(19) United States
(12) Patent Application Publication
(10) Pub. No.: US 2017/0044628 A1
(43) Pub. Date: Feb. 16, 2017

(54) COMPOSITIONS AND METHODS FOR ENHANCING AND/OR PREDICTING DNA AMPLIFICATION

(71) Applicant: ENVIROLOGIX INC., Portland, ME (US)

(72) Inventors: LARS PETERS, PORTLAND, ME (US); STEPHEN A. JUDICE, PORTLAND, ME (US); DANIEL SHAFFER, PORTLAND, ME (US); BRECK PARKER, PORTLAND, ME (US)

(73) Assignee: ENVIROLOGIX INC., PORTLAND, ME (US)

(21) Appl. No.: 15/306,032

(22) PCT Filed: Apr. 22, 2015
(86) PCT No.: PCT/US15/27074

§ 371 Date: Oct. 21, 2016

Related U.S. Application Data
(60) Provisional application No. 61/982,784, filed on Apr. 22, 2014.

(51) Int. Cl. C12Q 1/68

(52) U.S. Cl. CPC C12Q 1/6895; C12Q 2600/156

(57) ABSTRACT

The present invention features compositions and methods for amplifying a target oligonucleotide in a sample, including detection of the target oligonucleotide in real time.

### CROSS REFERENCE TO RELATED APPLICATIONS

[0001] This application claims priority to and the benefit of U.S. Provisional Application No. 61/982,784, filed Apr. 22, 2014, which is incorporated herein by reference in its entirety.

### BACKGROUND OF THE INVENTION

[0002] While methods of nucleic acid amplification are common and well-known, nucleic acid amplification reactions still suffer from unpredictable and/or poor performance due in large part to the difficulties associated with primer design. The unpredictability of nucleic acid amplification reactions is due in large part to a lack of sequence-predictable design parameters for primer and probes that allow a quantitative assessment of target-specific prime and probe hybridization versus off-target binding, self/self and self/non-self dimerization. Indeed, variability in the selection of possible primer sequences and sequence constraints imposed by target nucleic acid sequences, has made it difficult to empirically and systematically interrogate the landscape of primer combinations and their outcomes.

[0003] PCR assay-based design parameters have focused on primer and probe melting temperatures, GC (guanine and cytosine) content, primer length, and minimizing interactions of the primer with all but the target nucleic acid (see e.g., www.premierbiosoft.com/tech_notes/PCR_Primer_Design.html). In particular, use of a primer having intermolecular interactions with itself (e.g., primer-dimers) is highly discouraged, as such primers are believed to undesirably affect the interaction of the primer with the target nucleic acid molecule. Additionally, it is proposed that the optimal length of nucleic acid primers is 18-22 nucleotides, which is considered long enough for adequate specificity and short enough for primers to bind easily to the template at the annealing temperature. Regarding GC content, a GC content of 40-60% is recommended. Erroneously, common assay design practice assumes that when all the above mentioned parameters are designed equally for a forward and reverse primer of an amplification assay the hybridization kinetics of these two primers will turn out similar as well. None of these commonly used design parameters adequately correlate with complex thermodynamics of two stage oligonucleotide hybridization, which involves changes in enthalpy, entropy, solvation, nearest neighbor effects, and hydrogen bonding in the transition from the single stranded from to the double stranded hybrid stage. Moreover, even the use of the two stage model of oligonucleotide hybridization as the foundation of thermodynamic algorithms is overly simplified and does not reflect the real situation accurately. Therefore, the performance of primers meeting all of the recommended criteria remains unpredictable.

[0004] Progress in determining the effectiveness of a set of primers to predictably amplify a target nucleic acid under essentially isothermal conditions has the potential to reduce the expenditure of resources, including the effort, time, and expense of synthesizing and empirically testing a large multitude of primer sets (e.g., designing multiple primers and pairwise screening of multiple primer combinations). New parameters and methods are required to enhance and better predict the performance and yield of nucleic acid amplification reactions.

### SUMMARY OF THE INVENTION

[0005] As described herein, the present invention provides improved methods for designing primers capable of predictably amplifying a target nucleic acid molecule, and methods of using these primers for nucleic acid amplification, including enhancing amplification of a target nucleic acid molecule and/or reducing or eliminating the generation of background products. Further, the invention provides compositions and methods for the amplification and detection of a sample target oligonucleotide. In particular embodiments, compositions and methods of the invention are compatible with isothermal nucleic acid amplification reactions.

[0006] In one aspect, the invention provides an isolated primer oligonucleotide containing from 5′ to 3′, a first region having a self-complementary sequence containing from 5′ to 3′ the reverse complement of a nicking enzyme recognition sequence, a palindromic sequence, and said nicking enzyme recognition sequence, and a second region at least 16 nucleotides long that specifically binds to a complementary region on a target nucleic acid molecule to form a double-stranded hybrid having a ΔG that is at least 15 kcal/mol lower than the ΔG of any alternate structure involving or interacting with the second region, where the second region has at the 3′ end one or more 2′ modified nucleotides.

[0007] In another aspect, the invention provides an isolated primer-dimer having two oligonucleotide monomers containing from 5′ to 3′, a first region having a self-complementary sequence containing from 5′ to 3′ the reverse complement of a nicking enzyme recognition sequence, a palindromic sequence, and said nicking enzyme recognition sequence, and a second region at least 16 nucleotides long that specifically binds to a complementary region on a target nucleic acid molecule to form a double-stranded hybrid having a ΔG that is at least 15 kcal/mol lower than the ΔG of any alternate structure involving or interacting with the second region, where the second region has at the 3′ end one or more 2′ modified nucleotides.

[0008] In another aspect, the invention provides an isolated oligonucleotide probe for detecting a target nucleic acid molecule containing: an oligonucleotide; a fluorescent reporter; and a quenching molecule capable of absorbing the excitation energy from the fluorescent reporter; where the fluorescent reporter and quenching molecule are covalently attached to opposite 5′ and 3′ ends of the oligonucleotide, where the oligonucleotide contains a first region having a nucleic acid sequence that is substantially complementary to a target nucleic acid sequence and a second region 5′ upstream of the first region, and a third region 3′ downstream of the first region that has a nucleic acid sequence complementary to the second region, where the oligonucleotide is capable of forming a stem-loop hairpin structure by hybridization of the second and third regions when the oligonucleotide is not bound to the target nucleic acid molecule, and where the ΔG of the double-stranded hybrid between the target sequence and the first sequence of the oligonucleotide probe is at least 15 kcal/mol lower than the ΔG of any alternate structure involving or interacting with the oligonucleotide probe.

[0009] In another aspect, the invention provides a method of amplifying a specific product in a nicking and extension amplification reaction, the method involving: contacting a target nucleic acid molecule under substantially isothermal conditions with a polymerase, two or more primers, each of which specifically binds to a complementary sequence on the target nucleic acid molecule, a nicking enzyme, and a detectable polynucleotide probe, where at least one primer contains from 5′ to 3′, a first region having a self-complementary sequence containing from 5′ to 3′ the reverse complement of a nicking enzyme recognition sequence, a palindromic sequence, and said nicking enzyme recognition sequence, and a second region at least 16 nucleotides long that specifically binds to a complementary region on a target nucleic acid molecule to form a double-stranded hybrid having a ΔG that is at least 15 kcal/mol lower than the ΔG of any alternate structure involving or interacting with the second region, where the second region has at the 3′ end one or more 2′ modified nucleotides; and generating amplicons containing at least a portion of the target nucleic acid molecule.

[0010] In another aspect, the invention provides a method of detecting a specific product in a nicking and extension amplification reaction, the method involving: contacting a target nucleic acid molecule under substantially isothermal conditions with a polymerase, two or more primers, each of which specifically binds to a complementary sequence on the target nucleic acid molecule, a nicking enzyme, and a detectable oligonucleotide probe, where at least one primer contains from 5′ to 3′, a first region having a self-complementary sequence containing from 5′ to 3′ the reverse complement of a nicking enzyme recognition sequence, a palindromic sequence, and said nicking enzyme recognition sequence, and a second region at least 16 nucleotides long that specifically binds to a complementary region on a target nucleic acid molecule to form a double-stranded hybrid having a ΔG that is at least 15 kcal/mol lower than the ΔG of any alternate structure involving or interacting with the second region, where the second region has at the 3′ end one or more 2′ modified nucleotides; generating amplicons containing at least a portion of said target nucleic acid molecule; and detecting a signal specific for oligonucleotide probe hybridization to the target nucleic acid molecule or amplicon thereof, where the signal indicates the presence of the target nucleic acid molecule present in the sample or an amplicon thereof.

[0011] In another aspect, the invention provides a kit for amplifying a target sequence in a nicking amplification reaction, the kit containing one or more primer oligonucleotides containing from 5′ to 3′, a first region having a self-complementary sequence containing from 5′ to 3′ the reverse complement of a nicking enzyme recognition sequence, a palindromic sequence, and said nicking enzyme recognition sequence, and a second region at least 16 nucleotides long that specifically binds to a complementary region on a target nucleic acid molecule to form a double-stranded hybrid having a ΔG that is at least 15 kcal/mol lower than the ΔG of any alternate structure involving or interacting with the second region, where the second region has at the 3′ end one or more 2′ modified nucleotides; and directions for use of the primer oligonucleotides in the methods of the invention.

[0012] In a related aspect, the invention provides a method of selecting a primer oligonucleotide according to any aspect of the invention delineated herein, including providing computer program instructions on a tangible, non-transitory computer readable medium for implementing such methods of selecting a primer oligonucleotide.

[0013] In various embodiments of the above aspects, the first region is 12, 13, 14, 15, 16, 17, 18, 19, 20, 21, 22, 23, or 24 nucleotides in length. In various embodiments, the first region is fully self-complementary. In various embodiments of the above aspects, the palindromic sequence in the first region is 2, 4, or 6 nucleotides long. In various embodiments of the above aspects, the second region is 16, 17, 18, 19, 20, 21, 22, 23, 24, 25, 26, 27, 28, 29, or 30 nucleotides in length.

[0014] In various embodiments of the above aspects, the alternate structure is one or more of a partially double-stranded hybrid that the second region can form with itself (e.g., self-self dimers), with a partial sequence of the first region (e.g., heteromdimers), with other oligonucleotides, primers, or probes in an amplification reaction, or with partially complementary nucleic acid sequences outside of the target sequence region (e.g., off-target hybrids).

[0015] In various embodiments of the above aspects, the oligonucleotide (e.g., primer oligonucleotide, oligonucleotide monomer) is in the form of a homodimer (e.g., primer-dimer) formed by hybridization of the self-complementary first region sequences of two primer oligonucleotide molecules. In various embodiments, the homodimer has a ΔG that is at least 15 kcal/mol lower than the ΔG of any alternate structure involving or interacting with the primer oligonucleotide, including the most stable alternate structure comprising the primer oligonucleotide. In various embodiments of the above aspects, the free energy (ΔG) is determined or calculated for a nucleic acid at 25° C. (ΔG_{25° C.}) and/or at 1 atmosphere (atm) of pressure (˜101.3 kPa). In various embodiments of the above aspects, the free energy (ΔG) is determined or calculated by the mFold algorithm.

[0016] In various embodiments of the above aspects, the second region of the oligonucleotide (e.g., primer oligonucleotide, oligonucleotide monomer) includes one or more 2′ modified nucleotides, where the 2′ modification is selected from the group consisting of 2′-O-methyl, 2′-methoxyethoxy, 2′-fluoro, 2′-hydroxyl, 2′-alkyl, 2′-allyl, 2′-O-[2-(methylamino)-2-oxoethyl], 4′-thio, 4′-CH₂—O-2′-bridge, 4′-(CH₂)₂—O-2′-bridge, and 2′-O—(N-methylcarbamate) or those containing base analogs. In particular embodiments, the one or more 2′ modified nucleotides are positioned at the 3′ terminus of the second region. In other embodiments, the two or more 2′ modified nucleotides are contiguous. In still other embodiments, the number of contiguous 2′ modified nucleotides is 2, 3, 4, 5, or 6. In various embodiments of any aspect delineated herein, the nicking enzyme is one or more of Nt.BspD6I and Nt.BstNBI. In various embodiments of any aspect delineated herein, the nicking enzyme recognition sequence within the first region is 5′-GAGTC-3′ (and the reverse complement of the nicking enzyme recognition sequence is 5′-GACTC-3′). In various embodiments of any aspect delineated herein, the oligonucleotide (e.g., primer oligonucleotide, oligonucleotide monomer) has recognition sequence of the nicking agent is positioned to cleave the phosphodiester bond between the first and second regions. In various embodiments of the above aspects, the polymerase is a Geobacillus spp. or Bacillus stearothermophilus DNA polymerase I, or active fragments and derivatives thereof. In certain embodiments, the polymerase is one or more of Bst DNA polymerase I, Gst DNA polymerase I, or Gka DNA polymerase I.

[0017] In various embodiments of any aspect delineated herein, the oligonucleotide (e.g., primer oligonucleotide, oligonucleotide monomer) has a first region including a nucleic acid sequence set forth below:

5′-GACTCN₁N_{1′}GAGTC-3′;
5′-GACTCN₁N_{1′}GAGTCN-3′;
5′-N₂GACTCN₁N_{1′}GAGTCN_{2′}-3′;
5′-N₂GACTCN₁N_{1′}GAGTCN_{2′}N-3′;
5′-N₃N₂GACTCN₁N_{1′}GAGTCN_{2′}N_{3′}-3′;
5′-N₃N₂GACTCN₁N_{1′}GAGTCN_{2′}N_{3′}N-3′;
5′-N₄N₃N₂GACTCN₁N_{1′}GAGTCN_{2′}N_{3′}N_{4′}-3′;
5′-N₄N₃N₂GACTCN₁N_{1′}GAGTCN_{2′}N_{3′}N_{4′}N-3′;
5′-N₅N₄N₃N₂GACTCN₁N_{1′}GAGTCN_{2′}N_{3′}N_{4′}N_{5′}-3′;
5′-GACTCN₂N₁N_{1′}N_{2′}GAGTC-3′;
5′-GACTCN₂N₁N_{1′}N_{2′}GAGTCN-3′;
5′-N₃GACTCN₂N₁N_{1′}N_{2′}GAGTCN_{3′}-3′;
5′-N₃GACTCN₂N₁N_{1′}N_{2′}GAGTCN_{3′}N-3′;
5′-N₄N₃GACTCN₂N₁N_{1′}N_{2′}GAGTCN_{3′}N_{4′}-3′;
5′-N₄N₃GACTCN₂N₁N_{1′}N_{2′}GAGTCN_{3′}N_{4′}N-3′;
5′-N₅N₄N₃GACTCN₂N₁N_{1′}N_{2′}GAGTCN_{3′}N_{4′}N_{5′}-3′;
5′-N₅N₄N₃GACTCN₂N₁N_{1′}N_{2′}GAGTCN_{3′}N_{4′}N_{5′}N-3′;
and
5′-N₆N₅N₄N₃GACTCN₂N₁N_{1′}N_{2′}GAGTCN_{3′}N_{4′}N_{5′}N_{6′}-3′,
5′-GACTCN₃N₂N₁N_{1′}N_{2′}N_{3′}GAGTC-3′;
5′-GACTCN₃N₂N₁N_{1′}N_{2′}N_{3′}GAGTCN-3′;
5′-GACTCN₃N₂N₁N_{1′}N_{2′}N_{3′}GAGTCNN-3′;
5′-GACTCN₃N₂N₁N_{1′}N_{2′}N_{3′}GAGTCNNN-3′;
5′-GACTCN₃N₂N₁N_{1′}N_{2′}N_{3′}GAGTCNNNN-3′;
5′-N₄GACTCN₃N₂N₁N_{1′}N_{2′}N_{3′}GAGTCN_{4′}-3′;
5′-N₄GACTCN₃N₂N₁N_{1′}N_{2′}N_{3′}GAGTCN_{4′}N-3′;
5′-N₄GACTCN₃N₂N₁N_{1′}N_{2′}N_{3′}GAGTCN_{4′}NN-3′;
5′-N₄GACTCN₃N₂N₁N_{1′}N_{2′}N_{3′}GAGTCN_{4′}NNN-3′;
5′-N₅N₄GACTCN₃N₂N₁N_{1′}N_{2′}N_{3′}GAGTCN_{4′}N_{5′}-3′;
5′-N₅N₄GACTCN₃N₂N₁N_{1′}N_{2′}N_{3′}GAGTCN_{4′}N_{5′}N-3′;
5′-N₆N₅N4GACTCN₃N₂N₁N_{1′}N_{2′}N_{3′}GAGTCN_{4′}N_{5′}N_{6′}-3′;
5′-N₆N₅N4GACTCN₃N₂N₁N_{1′}N_{2′}N_{3′}GAGTCN_{4′}N_{5′}N_{6′}N-3′;
and
5′-N₇N₆N₅N₄GACTCN₃N₂N₁N_{1′}N_{2′}N_{3′}GAGTCN_{4′}N_{5′}N_{6′}N_{7′}-3′,

[0018] where “N” is any nucleotide (e.g., having an adenine (A), thymine (T), cytosine (C), or guanine (G) nucleobase), and N₁ is complementary to N_{1′}, N₂ to N_{2′}, N₃ to N_{3′}, N₄ to N_{4′}, N₅ to N_{5′}, N₆ to N_{6′}, and N₇ to N_{7′}. In certain embodiments, the oligonucleotide (e.g., primer oligonucleotide, oligonucleotide monomer) comprises a 5′ tail region comprising a sequence set forth in the Sequence Listing submitted herewith.

[0019] In various embodiments of any aspect delineated herein, the oligonucleotide probe for detecting a target nucleic acid molecule contains: an oligonucleotide; a fluorescent reporter; and a quenching molecule capable of absorbing the excitation energy from the fluorescent reporter; where the fluorescent reporter and quenching molecule are covalently attached to opposite 5′ and 3′ ends of the oligonucleotide, where the oligonucleotide contains a first region having a nucleic acid sequence that is substantially complementary to a target nucleic acid sequence and a second region 5′ upstream of the first region, and a third region 3′ downstream of the first region that has a nucleic acid sequence complementary to the second region, where the oligonucleotide is capable of forming a stem-loop hairpin structure by hybridization of the second and third regions when the oligonucleotide is not bound to the target nucleic acid molecule. In various embodiments of any aspect delineated herein, the ΔG of the double-stranded hybrid between the target sequence and the first sequence of the oligonucleotide probe is at least 15 kcal/mol lower than the ΔG of any alternate structure involving or interacting with the oligonucleotide probe. In various aspects, the second and the third regions of the oligonucleotide probe are 4-8 nucleotides in length.

[0020] In various embodiments of any aspect delineated herein, directions are provided for use of the primer oligonucleotides and/or oligonucleotide probes of the invention. In various embodiments of any aspect delineated herein, the primers and probes in a reaction are designed and/or selected to perform together in an amplification and detection reaction.

[0021] Other features and advantages of the invention will be apparent from the detailed description, and from the claims.

### DEFINITIONS

[0022] By “amplicon” is meant a polynucleotide generated during the amplification of a polynucleotide of interest. In one example, an amplicon is generated during a polymerase chain reaction.

[0023] By “amplification rate modifiers” is meant an agent capable of affecting the rate of polymerase extension.

[0024] By “base substitution” is meant a substituent of a nucleobase polymer that does not cause significant disruption of the hybridization between complementary nucleotide strands.

[0025] In this disclosure, “comprises,” “comprising,” “containing” and “having” and the like can have the meaning ascribed to them in U.S. patent law and can mean “includes,” “including,” and the like; “consisting essentially of” or “consists essentially” likewise has the meaning ascribed in U.S. patent law and the term is open-ended, allowing for the presence of more than that which is recited so long as basic or novel characteristics of that which is recited is not changed by the presence of more than that which is recited, but excludes prior art embodiments.

[0026] By “complementary” or “complementarity” is meant that a nucleic acid can form hydrogen bond(s) with another nucleic acid sequence by either traditional Watson-Crick or Hoogsteen base pairing. Complementary base pairing includes not only G-C and A-T base pairing, but also includes base pairing involving universal bases, such as inosine. A percent complementarity indicates the percentage of contiguous residues in a nucleic acid molecule that can form hydrogen bonds (e.g., Watson-Crick base pairing) with a second nucleic acid sequence (e.g., 5, 6, 7, 8, 9, or 10 nucleotides out of a total of 10 nucleotides in the first oligonucleotide being based paired to a second nucleic acid sequence having 10 nucleotides represents 50%, 60%, 70%, 80%, 90%, and 100% complementary respectively). To determine that a percent complementarity is of at least a certain percentage, the percentage of contiguous residues in a nucleic acid molecule that can form hydrogen bonds (e.g., Watson-Crick base pairing) with a second nucleic acid sequence is calculated and rounded to the nearest whole number (e.g., 12, 13, 14, 15, 16, or 17 nucleotides out of a total of 23 nucleotides in the first oligonucleotide being based paired to a second nucleic acid sequence having 23 nucleotides represents 52%, 57%, 61%, 65%, 70%, and 74%, respectively; and has at least 50%, 50%, 60%, 60%, 70%, and 70% complementarity, respectively). As used herein, “substantially complementary” refers to complementarity between the strands such that they are capable of hybridizing under biological conditions. Substantially complementary sequences have 60%, 70%, 80%, 90%, 95%, or even 100% complementarity. Additionally, techniques to determine if two strands are capable of hybridizing under biological conditions by examining their nucleotide sequences are well known in the art.

[0027] As used herein, “duplex” refers to a double helical structure formed by the interaction of two single stranded nucleic acids. A duplex is typically formed by the pairwise hydrogen bonding of bases, i.e., “base pairing”, between two single stranded nucleic acids which are oriented antiparallel with respect to each other. Base pairing in duplexes generally occurs by Watson-Crick base pairing, e.g., guanine (G) forms a base pair with cytosine (C) in DNA and RNA, adenine (A) forms a base pair with thymine (T) in DNA, and adenine (A) forms a base pair with uracil (U) in RNA. Conditions under which base pairs can form include physiological or biologically relevant conditions (e.g., intracellular: pH 7.2, 140 mM potassium ion; extracellular pH 7.4, 145 mM sodium ion). Furthermore, duplexes are stabilized by stacking interactions between adjacent nucleotides. As used herein, a duplex may be established or maintained by base pairing or by stacking interactions. A duplex is formed by two complementary nucleic acid strands, which may be substantially complementary or fully complementary. Single-stranded nucleic acids that base pair over a number of bases are said to “hybridize.”

[0028] “Detect” refers to identifying the presence, absence or amount of the analyte to be detected.

[0029] By “detectable moiety” is meant a composition that when linked to a molecule of interest renders the latter detectable, via spectroscopic, photochemical, biochemical, immunochemical, or chemical means. For example, useful labels include radioactive isotopes, magnetic beads, metallic beads, colloidal particles, fluorescent dyes, electron-dense reagents, enzymes (for example, as commonly used in an ELISA), biotin, digoxigenin, or haptens.

[0030] By “fragment” is meant a portion of a nucleic acid molecule. This portion contains, preferably, at least 10%, 20%, 30%, 40%, 50%, 60%, 70%, 80%, or 90% of the entire length of the reference nucleic acid molecule or polypeptide. A fragment may contain 5, 10, 15, 20, 30, 40, 50, 60, 70, 80, 90, or 100 nucleotides.

[0031] By “free energy (ΔG)” is meant the net exchange of energy between the system and its environment at a constant temperature and pressure described by the formula: ΔG=ΔH−TΔS. Free energy represents how favorable the formation of a structure is, where the formation of a structure having a more negative ΔG (e.g., expressed in kcal/mol) is thermodynamically more favored in a dynamic equilibrium of multiple alternate structures. Accordingly, ΔΔG measures the difference in favorability between the formation of two different structures having two different ΔGs. In one aspect, ΔΔG provides a numerical score measuring the favorability of formation of a desired oligonucleotide structure over the possible formation of other undesirable structures in dynamic equilibrium. In one embodiment, the first structure is the duplex hybrid formed between the first region (5′ tail region) of one oligonucleotide and the first region (5′ tail region) of a second oligonucleotide having the same nucleic acid sequence as the first oligonucleotide; and the second structure is any other alternate structure comprising the oligonucleotide.

[0032] By “hybridize” is meant to form a double-stranded molecule between complementary polynucleotide sequences (e.g., a gene described herein), or portions thereof, under various conditions of stringency. (See, e.g., Wahl, G. M. and S. L. Berger (1987) Methods Enzymol. 152:399; Kimmel, A. R. (1987) Methods Enzymol. 152:507). Hybridization occurs by hydrogen bonding, which may be Watson-Crick, Hoogsteen or reversed Hoogsteen hydrogen bonding, between complementary nucleobases. For example, adenine and thymine are complementary nucleobases that pair through the formation of hydrogen bonds.

[0033] By “nucleic acid hybrid” is meant a substantially double-stranded molecule formed by the binding of complementary nucleic acid molecules. In one embodiment, the double-stranded molecule is partially or fully double-stranded.

[0034] By “isolated polynucleotide” is meant a nucleic acid (e.g., a DNA) that is free of the genes which, in the naturally-occurring genome of the organism from which the nucleic acid molecule of the invention is derived, flank the gene. The term therefore includes, for example, a recombinant DNA that is incorporated into a vector; into an autonomously replicating plasmid or virus; or into the genomic DNA of a prokaryote or eukaryote; or that exists as a separate molecule (for example, a cDNA or a genomic or cDNA fragment produced by PCR or restriction endonuclease digestion) independent of other sequences. In addition, the term includes an RNA molecule that is transcribed from a DNA molecule, as well as a recombinant DNA that is part of a hybrid gene encoding additional polypeptide sequence.

[0035] The terms “isolated,” “purified,” or “biologically pure” refer to material that is free to varying degrees from components which normally accompany it as found in its native state. “Isolate” denotes a degree of separation from original source or surroundings. “Purify” denotes a degree of separation that is higher than isolation. A “purified” or “biologically pure” protein is sufficiently free of other materials such that any impurities do not materially affect the biological properties of the protein or cause other adverse consequences. That is, a nucleic acid or peptide of this invention is purified if it is substantially free of cellular material, viral material, or culture medium when produced by recombinant DNA techniques, or chemical precursors or other chemicals when chemically synthesized. Purity and homogeneity are typically determined using analytical chemistry techniques, for example, polyacrylamide gel electrophoresis or high performance liquid chromatography. The term “purified” can denote that a nucleic acid or protein gives rise to essentially one band in an electrophoretic gel. For a protein that can be subjected to modifications, for example, phosphorylation or glycosylation, different modifications may give rise to different isolated proteins, which can be separately purified.

[0036] By “melting temperature (Tm)” is meant the temperature of a system in equilibrium where 50% of the molecular population is in one state and 50% of the population is in another state. With regard to the nucleic acids of the invention, Tm is the temperature at which 50% of the population is single-stranded and 50% is double-stranded (e.g., intramolecularly or intermolecularly).

[0037] By “monitoring a reaction” is meant detecting the progress of a reaction. In one embodiment, monitoring reaction progression involves detecting polymerase extension and/or detecting the completion of an amplification reaction.

[0038] As used herein, “obtaining” as in “obtaining an agent” includes synthesizing, purchasing, or otherwise acquiring the agent.

[0039] As used herein, the term “nucleic acid” refers to deoxyribonucleotides, ribonucleotides, or modified nucleotides, and polymers thereof in single- or double-stranded form. The term encompasses nucleic acids containing known nucleotide analogs or modified backbone residues or linkages, which are synthetic, naturally occurring, and non-naturally occurring, which have similar binding properties as the reference nucleic acid, and which are metabolized in a manner similar to the reference nucleotides. Examples of such analogs include, without limitation, 2′ modified nucleotides (e.g., 2′-O-methyl ribonucleotides, 2′-F nucleotides).

[0040] As used herein, “modified nucleotide” refers to a nucleotide that has one or more modifications to the nucleoside, the nucleobase, pentose ring, or phosphate group. For example, modified nucleotides exclude ribonucleotides containing adenosine monophosphate, guanosine monophosphate, uridine monophosphate, and cytidine monophosphate and deoxyribonucleotides containing deoxyadenosine monophosphate, deoxyguanosine monophosphate, deoxythymidine monophosphate, and deoxycytidine monophosphate. Modifications include those naturally occurring that result from modification by enzymes that modify nucleotides, such as methyltransferases. Modified nucleotides also include synthetic or non-naturally occurring nucleotides. Synthetic or non-naturally occurring modifications in nucleotides include those with 2′ modifications, e.g., 2′-O-methyl, 2′-methoxyethoxy, 2′-fluoro, 2′-hydroxyl (RNA), 2′-allyl, 2′-O-[2-(methylamino)-2-oxoethyl], 4′-thio, 4′-CH₂—O-2′-bridge, 4′-(CH₂)₂—O-2′-bridge, and 2′-O—(N-methylcarbamate) or those comprising base analogs.

[0041] By “nucleotide adduct” is meant a moiety that is bound covalently or otherwise fixed to a standard nucleotide base.

[0042] By “nicking agent” is meant a chemical entity capable of recognizing and binding to a specific structure in double stranded nucleic acid molecules and breaking a phosphodiester bond between adjoining nucleotides on a single strand upon binding to its recognized specific structure, thereby creating a free 3′-hydroxyl group on the terminal nucleotide preceding the nick site. In preferred embodiments, the 3′ end can be extended by an exonuclease deficient polymerase. Exemplary nicking agents include nicking enzymes, RNAzymes, DNAzymes, and transition metal chelators.

[0043] By “palindromic” is meant nucleic acid sequences that are identical when read from 5′ to 3′ on one strand or 5′ to 3′ on the complementary strand. A perfect palindrome refers to a sequence having two adjacent subsequences, such that when one subsequence is read from the 5′ to 3′ direction, it is identical to the other subsequence read from the 3′ to 5′ direction.

[0044] By “polymerase-arresting molecule” is meant a moiety associated with a polynucleotide template or primer that prevents or significantly reduces the progression of a polymerase on the polynucleotide template. Preferably, the moiety is incorporated into the polynucleotide. In one preferred embodiment, the moiety prevents the polymerase from progressing on the template.

[0045] By “polymerase extension” is meant the forward progression of a polymerase that matches incoming monomers to their binding partners on a template polynucleotide.

[0046] As used herein, “primer-dimer” is meant a dimer of two monomer oligonucleotide primers. In the oligonucleotide primers of the invention, the 5′ tail regions of monomer primers dimerize.

[0047] By “specific product” is meant a polynucleotide product resulting from the hybridization of primer oligonucleotides to a complementary target sequence and subsequent polymerase mediated extension of the target sequence.

[0048] By “substantially isothermal condition” is meant at a single temperature or within a narrow range of temperatures that does not vary significantly. In one embodiment, a reaction carried out under substantially isothermal conditions is carried out at a temperature that varies by only about 1-5° C. (e.g., varying by 1, 2, 3, 4, or 5 degrees). In another embodiment, the reaction is carried out at a single temperature within the operating parameters of the instrument utilized.

[0049] By “reference” is meant a standard or control condition. As is apparent to one skilled in the art, an appropriate reference is where an element is changed in order to determine the effect of the element.

[0050] By “subject” is meant a mammal, including, but not limited to, a human or non-human mammal, such as a bovine, equine, canine, ovine, or feline.

[0051] By “target nucleic acid molecule” is meant a polynucleotide to be analyzed. Such polynucleotide may be a sense or antisense strand of the target sequence. The term “target nucleic acid molecule” also refers to amplicons of the original target sequence.

[0052] Ranges provided herein are understood to be shorthand for all of the values within the range. For example, a range of 1 to 50 is understood to include any number, combination of numbers, or sub-range from the group consisting 1, 2, 3, 4, 5, 6, 7, 8, 9, 10, 11, 12, 13, 14, 15, 16, 17, 18, 19, 20, 21, 22, 23, 24, 25, 26, 27, 28, 29, 30, 31, 32, 33, 34, 35, 36, 37, 38, 39, 40, 41, 42, 43, 44, 45, 46, 47, 48, 49, or 50.

[0053] Unless specifically stated or obvious from context, as used herein, the term “or” is understood to be inclusive. Unless specifically stated or obvious from context, as used herein, the terms “a”, “an”, and “the” are understood to be singular or plural.

[0054] Unless specifically stated or obvious from context, as used herein, the term “about” is understood as within a range of normal tolerance in the art, for example within 2 standard deviations of the mean. About can be understood as within 10%, 9%, 8%, 7%, 6%, 5%, 4%, 3%, 2%, 1%, 0.5%, 0.1%, 0.05%, or 0.01% of the stated value. Unless otherwise clear from context, all numerical values provided herein are modified by the term about.

[0055] The recitation of a listing of chemical groups in any definition of a variable herein includes definitions of that variable as any single group or combination of listed groups. The recitation of an embodiment for a variable or aspect herein includes that embodiment as any single embodiment or in combination with any other embodiments or portions thereof.

[0056] Any compositions or methods provided herein can be combined with one or more of any of the other compositions and methods provided herein.

### BRIEF DESCRIPTION OF THE DRAWINGS

[0057] FIG. 1 depicts a mechanism describing a strand displacement nucleic acid amplification reaction of a target nucleic acid molecule having efficient, exponential amplification. The interaction of the 3′ end of a target nucleic acid molecule (gray) with a corresponding, sequence-specific primer having a 3′ recognition region (red) and “5′ tail” region capable of dimerization (black) is shown. For target specific amplification, the 3′ recognition region (red) is complementary in sequence to and capable of specifically hybridizing to the target nucleic acid. The primer in an active configuration is a stable homodimer (termed a “primer-dimer”) formed by the dimerization of the 5′ tail regions of two monomer primers. In one specific embodiment, the primer has a self-complementary, symmetrically inverted sequence. The resulting primer-dimer has a double-stranded or substantially double-stranded dimerization region (black) that is 5′ with respect to the single-stranded recognition regions (red). That is, the target specific portion of the primer (capable of annealing to the target nucleic acid molecule) is exposed in the primer-dimer as the 3′ single-stranded regions. At the start of the reaction, a 3′ single-strand portion of the primer-dimer anneals to a target nucleic acid molecule, and initiates replication of the target nucleic acid molecule. During the course of the reaction, monomer primers are released from extended primer-dimers by polymerase strand displacement action from synthesis of the complementary strand. To enhance the specificity and/or efficiency of the amplification reaction, monomer primers are designed to have (1) a 5′ tail region having a sequence that is self-complementary, symmetrical or substantially symmetrical, and capable of base pairing to itself and (2) a 3′ recognition region perfectly or substantially complementary in sequence to and capable of specifically hybridizing to the target nucleic acid molecule. When ΔG for primer-dimer formation is low, the time a primer is present as a monomer with an open configuration is minimized. Monomer primers are undesirable because they can serve as either a template or primer in non-target-specific primer extension reactions, thereby generating and/or amplifying background. Preferably, the transition from monomer to dimer is “virtually instantaneous” or as brief as kinetically possible. Thermodynamic factors (e.g., very low ΔG of primer-dimer formation, high primer concentration, high dimer Tm) are used to favor primer-dimer formation.

[0058] FIG. 2 depicts a mechanism describing a strand displacement nucleic acid amplification reaction of a target nucleic acid having inefficient amplification. The interaction of the 3′ end of a target nucleic acid molecule (gray) with a corresponding, sequence-specific primer (red and black) is shown. Isothermal reactions where monomer primers in an open configuration persist throughout the reaction lead to linear non-specific background amplification. Primer monomers that do not favor primer-dimer formation have, for example, minimal or no self-complementary sequences in the 5′ portion of the monomer primer (black), resulting in a high ΔG for primer-dimer formation. Because interaction of the primer-dimer with the target nucleic acid molecule drives the annealing and extension reactions, formation of primer-dimers affects the efficiency of target nucleic acid synthesis and/or amplification. In the fully or partially open configuration, a primer monomer can serve either as a template or a primer in non-target-specific primer extension reactions (see inset), which leads to additional reaction inefficiencies. Where the open configuration of monomer primers is not minimized (e.g., by sequence design), the transition from monomer to dimer is slow, because it is not favored by thermodynamic factors (e.g., multiple dimer and partial dimer configurations co-having similar ΔG's and low dimer Tm's).

[0059] FIG. 3 depicts primer structures that inhibit primer-dimer formation including, for example, structures (A) to (C) which lead to amplification of non-specific by-products (structures (H) to (J)) or structures (D) and (K), which are incapable of target hybridization. Interactions between primers (red and black) nucleic acid fragments (gray) are shown. Structure (A) depicts a primer monomer having a discontinuous inverted sequence in the target specific region that is capable of “looping” back to create an extendable 3′-end for “self-replication.” Structure (A) also has a 5′ region that loops back on itself to form a hairpin structure. Structure (B) depicts a primer-dimer having discontinuous inverted sequences in the target specific region of the primer that are capable of “looping” back to create extendable 3′-ends for “self-replication. Structure (C) depicts a false hybrid structure between a primer monomer in “open” configuration and a single stranded DNA fragment (gray) displaced by DNA polymerase nick-extension reactions from closely positioned random and/or sequence-specific nicks in template DNA. Structure (D) depicts a partially double-stranded dimer structure, where a significant part of the target-specific region is not accessible for target hybridization. Structure (D) may be formed by inverted sequence repeats in the primer monomer. Structure (E) depicts an intermediate, false primer extension/strand displacement reaction product generated from structure (A). Structure (G) depicts an intermediate, false primer extension/strand displacement reaction product generated from structure (B). Structure (H) depicts a mature, false reaction product in “nick & kick” mode, resulting in continuous recycling and amplification of single stranded by-products. Structure (J) depicts mature, false reaction products in “nick & kick” mode, resulting in continuous recycling and amplification of single stranded by-products. Structure (K) depicts the persistence of the partially double-stranded dimer of structure (D) in the reaction. Because a significant part of the target-specific region is not accessible for target hybridization, target nucleic acid replication and/or amplification is inhibited or fails to initiate. Primer design in accordance with the invention promotes optimal primer-dimer formation, which minimizes the formation of undesirable primer structures and their inhibitory effects on target specific nucleic acid amplification.

[0060] FIG. 4 shows desirable (right) and undesirable (left) primer structures. The primers of the invention may adopt a structure favorable to the amplification reaction, including primer-dimers and/or a hairpin, due to the presence of self-complementary sequences. Without being bound to theory, primer dimers are more stable and form when primers are present at high concentration in the reaction (e.g., at the start of the reaction) and hairpins form when primer concentration is reduced (e.g., during the course of the reaction).

[0061] FIG. 5 depicts an undesirable primer configuration where a dynamic equilibrium exists between configurations of non-optimal primers. Where the ΔG's corresponding to the formation of each structure are about the same (i.e., ΔG₁≈ΔG₂≈ΔG₃≈ΔG₄), there is no favored primer configuration or structure. When a primer exists in such multiple configurations, it is not optimally configured to promote the nucleic acid amplification reaction.

[0062] FIG. 6 shows that an optimal primer is one in which the dimer configuration is highly favored (i.e., ΔG₁>>ΔG₂), especially over the next favored configuration (e.g., where the primer interacts with itself intramolecularly). This configuration is in contrast to FIG. 5, where a dynamic equilibrium exists between configurations. Primers can be designed to have stable configurations and structures favorable for nucleic acid amplification reactions, while reducing or eliminating the formation of undesirable primer configurations and structures. For primers having a 5′ tail dimerization region, the 5′ tail sequence is selected to favor and be more stable than other structures (ΔG₁≦−30 to −62 kcal/mol). For primers in nicking amplification reactions, the 5′ tail sequence is substantially self-complementary and symmetrically inverted. Such primers may have the potential to form intramolecular interactions (e.g., a hair-pin loop). However, such configurations are minimized when the symmetrically inverted sequences are fully self-complementary, as indicated by the stability of the primer-dimer over the hair-pin loop structure (a very low ΔG₁ in comparison to ΔG₂). Thus, when the primer is at a high enough concentration, the hair-pin is not effectively formed.

[0063] FIG. 7 depicts sequences of stable primer-dimer structures of primers useful in nicking amplification reactions. FIG. 7 depicts a homodimer of a primer dimer having a 5′ tail region with a nicking enzyme recognition sequence for a top strand nicking enzyme (Nt.BstNBI). The nick site is designed to be positioned between the nucleotide at the 3′ end of the 5′ tail region and the nucleotide at the 5′ end of the 3′ recognition region. Without being bound to theory, the nicking enzyme does not cleave at the nick site when the 3′ recognition is single-stranded. However, cleavage at the nick site occurs when the 3′ recognition region is double stranded (e.g., when the primer is incorporated into a double-stranded target nucleic acid molecule during the course of the nucleic acid amplification reaction).

[0064] FIGS. 8A-8C depict exemplary 5′ tail region sequences. FIG. 8A depicts exemplary 5′ tail region sequences 24 nucleotides in length having a Nt.BstNBI recognition sequence and based on the following formula: 5′-NNNNGACTCNNNNNNGAGTCNNNN-3′. Based on this formula, there are 537,824 5′ tail sequences having the following properties: ΔG=−34.2 Kcal/mole to −65 kcal/mole; ΔΔG<−40 kcal/mole; and GC content 68% to 84%. Of these, 1050 selected sequences are provided, representing 0.2% of the entire sequence space (248,832). FIG. 8B depicts exemplary 5′ tail region sequences 22 nucleotides in length having a Nt.BstNBI recognition sequence and based on the following formula: 5′-NNNNGACTCNNNNGAGTCNNNN-3′. Based on this formula, there are 248,832 5′ tail sequences having the following properties: ΔG=−47 Kcal/mole to −55 kcal/mole; ΔΔG<−40 kcal/mole; and GC content 72% to 82%. Of these, 200 selected sequences are provided, representing 0.08% of the entire sequence space (248,832). FIG. 8C depicts exemplary 5′ tail region sequences having a 6 nucleotide spacer region.

[0065] FIG. 9 are graphs showing target specific nucleic acid amplification using primers of the invention having 5′ tail and 3′ recognition regions as detected by dual channel detection of DNA amplification. Target-specific products are detected by a molecular beacon probe (top panel). Non-specific nucleic acid amplification is detected by SYBRGreen. As seen in both graphs, exponential amplification begins at around 6 minutes, indicating that amplification is target specific. Control reactions having no input did not produce substantial background.

[0066] FIG. 10 is a graph showing that nucleic acid amplification using primers of the invention having 5′ tail and 3′ recognition regions have characteristics useful for rapid detection of target nucleic acids. Such reactions are characterized by a high signal-to-noise ratio ([RFU_{MAX}−RFU_{BL}]), steep slope (high value of [RFU_{MAX}−RFU_{BL}]/[T_{OSEA}−T_{RFUmax}]), early onset of the exponential amplification phase (T_{OSEA}<10 min) and low signal variance between replicated assay reactions of the same sample.

[0067] FIG. 11 is a graph of working and failed assay primers plotted according to their relative stabilities. Primers having a 3′ recognition region having a ΔΔG ≦about −16 kcal/mole were observed to work in nicking amplification assays, while primers having a ΔΔG >about −16 were prone to failure. Primers having a 3′ recognition region having a ΔΔG ≦about −16 kcal/mole and a 5′ tail having a ΔΔG ≦about −30 kcal/mole were all observed to work.

[0068] FIG. 12 depicts the design of an isothermal DNA amplification assay for Soy Lectin from a single pair of predicted optimal primer structures and a single predicted optimal probe without screening a multitude of candidate primer combinations of unknown performance.

[0069] FIG. 13 is a graph depicting results of the first experimental trial of the isothermal DNA amplification assay for Soy Lectin, which empirically confirm assay performance prediction. Target specific amplification was observed in reactions containing soy genomic DNA. No amplification was observed in no target control reactions.

[0070] FIG. 14 depicts the design of an isothermal DNA amplification assay for pathogenic Salmonella enterica invA gene from a single pair of predicted optimal primer structures and a single predicted optimal probe without screening a multitude of candidate primer combinations of unknown performance.

[0071] FIG. 15 is a graph depicting results of the first experimental trial of the isothermal DNA amplification assay for pathogenic Salmonella enterica invA gene, which empirically confirm assay performance prediction. Target specific amplification was observed in reactions containing soy genomic DNA. No amplification was observed in no target control reactions.

[0072] FIG. 16 includes two graphs showing that the isothermal DNA amplification assay for Salmonella enterica invA gene is readily optimized.

[0073] FIGS. 17A-17I shows Primer Structure Parameter (T_{M}, % GC, bp Length, ΔG_{25° C.}, ΔΔG_{25° C.}) Cluster Analysis. FIG. 17A is a graph plotting ΔΔG in kcal/mol of first primer region (5′-tail) self-self dimer of working assay primers and failed assay primers against ΔΔG in kcal/mol of second primer region/target hybrid duplex. Clustering of working assay primers and failed assay primers showed correlation with function/non-function. FIG. 17B is a graph plotting length in bases of second primer target-complementary region of working assay primers and failed assay primers against % GC content of second primer target-complementary region. Working assay primers and failed assay primers showed a random distribution. FIG. 17C is a graph plotting length in bases of second primer target-complementary region of working assay primers and failed assay primers against ΔG in kcal/mol of second primer region/target hybrid duplex. Working assay primers and failed assay primers showed a random distribution. FIG. 17D is a graph plotting T_{M} in ° C. of second primer region/target hybrid duplex of working assay primers and failed assay primers against ΔG in kcal/mol of second primer region/target hybrid duplex. Working assay primers and failed assay primers showed no correlation with function/non-function. FIG. 17E is a graph plotting ΔG in kcal/mol of most favored second primer region/off-target hybrid duplex of working assay primers and failed assay primers against ΔG in kcal/mol of primer region/target hybrid duplex. Working assay primers and failed assay primers showed a random distribution. FIG. 17F is a graph plotting % GC content of second primer region of working assay primers and failed assay primers against T_{M} in ° C. of second primer region/target hybrid duplex. Working assay primers and failed assay primers showed a random distribution. FIG. 17G is a graph plotting % GC content of second primer region of working assay primers and failed assay primers against ΔG in kcal/mol of second primer region/target hybrid duplex. Working assay primers and failed assay primers showed a random distribution. FIG. 17H is a graph plotting % GC content of second primer region of working assay primers and failed assay primers against T_{M} in ° C. of second primer region/target hybrid duplex. Working assay primers and failed assay primers showed a random distribution. FIG. 17I is a graph plotting length in bases of primer (3′ target recognition region) of working assay primers and failed assay primers against T_{M} in ° C. of primer-target hybrid duplex. Working assay primers and failed assay primers showed a random distribution.

### DETAILED DESCRIPTION OF THE INVENTION

[0074] The invention methods that are useful for the predictable design of primers, and methods of using such primers for the amplification of a target nucleic acid molecule in a nucleic acid amplification reaction. The compositions and methods are also useful for the amplification and detection of a target nucleic acid molecule in a nucleic acid amplification reaction, including in a nicking amplification reaction.

[0075] The invention is based, at least in part, on several discoveries relating to oligonucleotides used in nucleic amplification reactions, including primers and probes, and their effect on enhancing or enabling nucleic acid amplification reactions. Applicants were the first to appreciate that one or more of these discoveries in combination could be applied to design primers and probes for nucleic acid amplification reactions and/or detection assays.

[0076] The invention is based, at least in part, on the discovery that oligonucleotides (e.g., primers and probes) in certain configurations have the potential to enhance nucleic acid amplification reaction performance, and that the ability of the oligonucleotides to adopt favorable configurations can be determined by examining the difference in free energy change (ΔG) between desired specific oligonucleotide-target sequence hybrids and various non-specific intramolecular (partially double-stranded monomers) and intermolecular complexes (primer-primer and primer-probe dimers, off-target hybrids) of the oligonucleotide. To date, primer and probe design has not employed the difference in free energy change between target-specific and non-specific primer and probe structures as a score ranking tool to identify the most suitable primer/probe set for a target sequence amplification assay. Application of the foregoing considerations to primer design results in the design of primers that function predictably, minimizing or eliminating the need for empirical testing. Accordingly, the invention provides methods for primer sequence selection, primer modification, and/or probe design that facilitates operational nucleic acid amplification and detection reactions.

[0077] Applicants have discovered that a primer having a 3′ recognition sequence whose primer-target formation is stable (e.g., ΔG_{25° C.}≦about −20 kcal/mol or more) has the potential to enhance nucleic acid amplification reaction performance. In particular embodiments, the 3′ target recognition sequence comprises 12-24, 12-17, or 12-14 bases. In particular embodiments, the primer-target formation is more stable than self dimer formation (e.g., ΔΔG≦about −15, −16, −17, −18, −19, −20 kcal/mol or more). Indeed, it has been found that a difference between a working and non-working assay is when the ΔΔG <about −15 kcal/mol (see, e.g., FIG. 11).

[0078] Additionally, Applicants have discovered that a primer having a 5′ tail region capable of self-dimerization enhances nucleic acid amplification reaction performance. Without being bound to theory, in a nucleic acid amplification reaction the primer anneals to the target nucleic acid as a primer-dimer (see e.g., FIG. 1). Surprisingly and unexpectedly, this primer-dimer configuration does not detectably interfere with polymerase activity, and reduces or prevents non-specific interaction of the 5′ portion of the primer with itself or other nucleic acid molecules. The 5′ tail region comprises a perfect palindrome sequence, through which monomer primers can dimerize. For example, primers have a nicking agent recognition site present at the 5′ end that is unrelated to the binding specificity of the primer for the target recognition sequence. Non-specific background products from non-specific primer interactions have the potential to sequester reaction components that would otherwise have been utilized for the amplification of the specific product. In various embodiments, homodimer formation is stable (e.g., ΔG_{25° C.}≦about −30, −35, −40, −45, −50, −55, −60 kcal/mol or more). In various embodiments, the homodimer has a melting temperature higher than the extension reaction temperature. In particular embodiments, the 5′ tail region has a sequence that is a palindrome. In further embodiments, the 5′ tail region is at least 20 bases (e.g., 20, 21, 22, 23, 24 bases) in length. In additional embodiments, the 5′ tail region has a GC content of 80-90%. In certain embodiments, homodimer formation is more stable than formation of other less stable primer dimer conformations (ΔΔG≦about −15, −20, −25, −30, −35, −40 kcal/mol or more).

[0079] Further, Applicants have discovered that primers comprising a 2′ modified nucleotide (e.g., 2′-O-methyl, 2′-Fluoro, 2′-alkyl) at the 3′ end of the 3′ recognition region reduce or eliminate non-specific background products. This increases the generation of specific products in nucleic acid amplification reactions without the generation of background products. In various embodiments, one or more of the nucleotides in the 3′ recognition region comprises a modified nucleobase that destabilizes mismatched base pairs. In particular embodiments, a modified nucleobase is in two or more continuous nucleotides starting at position 1, 2, 3, 4, 5, or 6 from the 3′ terminus, where position 1 is the nucleotide at the 3′ terminus. In specific embodiments, no fewer than 8 and no more than 10 unmodified nucleotides are positioned between the first 5′ nucleotide of the 3′ recognition region and the nearest 3′ modified nucleotide.

[0080] In specific embodiments, the primer comprises a 3′ recognition region and a 5′ tail dimerization region. Under reaction conditions, monomer primers dimerize to form primer-dimers by binding of their 5′ tail dimerization regions. Without being bound to theory, a single-stranded 3′ recognition region of the primer-dimer anneals the target nucleic acid molecule and synthesizes the complementary target strand. A monomer primer is released from the extended strand by polymerase strand displacement action from synthesis of the complementary strand. The released monomer primer dimerizes with another free monomer by 5′ tail region binding. Multiple cycles result in exponential target nucleic acid amplification.

### Primer Design

[0081] Conventional methods for primer design have focused on primer melting temperature, primer annealing temperature, GC (guaninine and cytosine) content, primer length, and minimizing interactions of the primer with all but the target nucleic acid (see e.g., www.premierbiosoft.com/tech_notes/PCR_Primer_Design.html). Contrary to these methods, it has been found that primers that form stable primer/dimers, expressed in terms of free energy of formation (ΔG), function predictably in nucleic acid amplification reactions. While Free Energy (ΔG) and Melting Temperature (Tm) share primary components Enthalpy (ΔH) and Entropy (ΔS), ΔG and Tm values are derived differently and have no correlative relationship, and the only way to relate a given ΔG with a given Tm value is to explicitly know the value of ΔH and ΔS from which they are derived (Manthey, “mFold, Delta G, and Melting Temperature” 02005 and 2011 Integrated DNA Technologies). FIGS. 1-11 relate to the design of optimal primers.

[0082] The free energy of formation (ΔG) for intermolecular primer structures may be calculated using formulas known in the art. A number of programs are available for determining the formation of various intramolecular and intermolecular primer structures and calculating their ΔG's, including for example mfold and UNAfold prediction algorithms (see e.g., Markham and Zuker. UNAFold: Software for Nucleic Acid Folding and Hybridization. Bioinformatics: Volume 2, Chapter 1, pp 3-31, Humana Press Inc., 2008; Zuker et al. Algorithms and Thermodynamics for RNA Secondary Structure Prediction: A Practical Guide In RNA Biochemistry and Biotechnology, 11-43, NATO ASI Series, Kluwer Academic Publishers, 1999; M. Zuker. Prediction of RNA Secondary Structure by Energy Minimization. Methods in Molecular Biology, 267-294, 1994; Jaeger et al. Predicting Optimal and Suboptimal Secondary Structure for RNA. In Molecular Evolution: Computer Analysis of Protein and Nucleic Acid Sequences, Methods in Enzymology 183, 281-306, 1990; Zuker. On Finding All Suboptimal Foldings of an RNA Molecule. Science 244, 48-52, 1989). OligoAnalyzer 3.1 is one such implementation of mfold for primer design (www.idtdna.com/analyzer/Applications/OligoAnalyzer/). For example with reference to OligoAnalyzer 3.1, ΔG calculations may be performed using the following parameters: Target Type: DNA; Oligo Concentration 0.25 μM; Na⁺ Concentration: 60 mM; Mg⁺⁺ Concentration: 15 mM; and dNTPs Concentration: 0.3 mM.

### 3′ Recognition Region

[0083] The invention provides a primer having a 3′ recognition sequence whose primer-target formation is stable (ΔG≦about −20 kcal/mol or more) has the potential to enhance nucleic acid amplification reaction performance. The 3′ recognition region specifically binds to the a target nucleic acid, for example a complementary sequence of the target nucleic acid. In certain embodiments, the 3′ recognition region has a sequence that is complementary to 12, 13, 14, 15, 16, 17, 18, 19, or 20 bases or more of a target nucleic acid sequence. In various embodiments, the primer-target melting temperature is equal to or greater than 8° or 6° C. below the reaction or extension temperature of the assay (Tm≧assay temperature−8°). In particular embodiments, the 3′ recognition sequence comprises 12-20, 12-17, or 12-14 nucleotides. In particular embodiments, the primer-target formation is more stable than self dimer formation (e.g., ΔΔG≦about −15, −16, −17, −18, −19, −20 kcal/mol or more). Indeed, it has been found that a difference between a working and non-working assay is when the ΔΔG <about −15 kcal/mol (see, e.g., FIG. 11). Preferably, the 3′ recognition sequence does not contain self-complementary sequences, short inverted repeats (e.g., >4 bases/repeat), or sequences that otherwise promote intramolecular interactions, which have the potential to interfere with primer-target annealing.

[0084] In particular, a primer of the invention having a 3′ recognition sequence is useful in nicking amplification assays. Additionally, the target specific 3′ recognition region comprises one or more 2′ modified nucleotides (e.g., 2′-O-methyl, 2′-methoxyethoxy, 2′-fluoro, 2′-alkyl, 2′-allyl, 2′-O-[2-(methylamino)-2-oxoethyl], 2′-hydroxyl (RNA), 4′-thio, 4′-CH₂—O-2′-bridge, 4′-(CH₂)₂—O-2′-bridge, and 2′-O—(N-methylcarbamate)). Without being bound to theory, it is hypothesized that incorporating one or more 2′ modified nucleotides in the recognition regions reduces or eliminates intermolecular and/or intramolecular interactions of primers (e.g., primer-dimer formation), and, thereby, reduces or eliminates the background signal in isothermal amplification. The 2′ modified nucleotide preferably has a base that base pairs with the target sequence. In particular embodiments, two or more 2′ modified nucleotides (e.g., 2, 3, 4, 5 or more 2′ modified nucleotides) in the target specific recognition region are contiguous (e.g., a block of modified nucleotides). In some embodiments, the block of 2′ modified nucleotides is positioned at the 3′ end of the target specific recognition region. In other embodiments, the block of 2′ modified nucleotides is positioned at the 5′ end of the target specific recognition region. When the block of 2′ modified nucleotides is positioned at the 5′ end of the target specific recognition region, the 2′ modified nucleotides may be separated from the nick site by one or more non-modified nucleotides (e.g., 2, 3, 4, 5 or more 2′ unmodified nucleotides). Applicants have found that positioning of one or more 2′ modified nucleotides or of a block of 2′ modified nucleotides alters the kinetics of amplification. When the one or more 2′ modified nucleotides or block of 2′ modified nucleotides are positioned at or near the 5′ end of the recognition region or proximal to the nick site, real-time amplification reactions showed decreased time to detection. Additionally, the signal curve is contracted and the slope of the curve shifted.

[0085] In a related embodiment, ratios of a primer having one or more 2′ modified nucleotides can be used to alter the time-to-detection and/or the efficiency of the reaction for the ‘tuning’ of reactions, resulting in a predictable control over reaction kinetics. Increasing the ratio of primer having one or more 2′ modified nucleotides at the 3′ end of the recognition sequence to primer having one or more 2′ modified nucleotides at the 5′ end of the recognition sequence contracted the signal curve and shifted the slope of the curve. It is advantageous to be able to “tune” a reaction providing a means to manipulate both the time-to-detection as well as the efficiency of the reaction. Tuning the reactions can be used to match efficiencies of target nucleic acid amplification and reference nucleic amplification (e.g., internal standard) in quantitative PCR (qPCR). Additionally, amplification curves of the target nucleic acid and the internal standard may be altered so time of detection of their amplification products are separated, while providing the same efficiency for target nucleic acid amplification and internal standard amplification. Through the use of specific combinations and ratios of oligonucleotide structures within a reaction it is possible to create conditions which enable tuned reaction performance.

### 5′ Tail Dimerization Region

[0086] The invention provides a primer having a 5′ tail region capable of self-dimerization that enhances nucleic acid amplification reaction performance. Without being bound to theory, in a nucleic acid amplification reaction the primer anneals to the target nucleic acid as a primer-dimer (see e.g., FIG. 1). For example, nicking amplification primers have a nicking agent recognition site present at the 5′ end that is unrelated to the binding specificity of the primer for the target recognition sequence. Non-specific background products from non-specific primer interactions have the potential to sequester reaction components that would otherwise have been utilized for the amplification of the specific product. In various embodiments, homodimer formation is stable (e.g., ΔG≦about −30, −35, −40, −45, −50, −55, −60 kcal/mol or more). In various embodiments, the homodimer has a melting temperature higher than the extension reaction temperature. In particular embodiments, the 5′ tail region has a sequence that is a palindrome. In further embodiments, the 5′ tail region is at least 12 bases (e.g., 12, 13, 14, 15, 16, 17, 18, 19, 20, 21, 22, 23, 24 bases) in length. In additional embodiments, the 5′ tail region has a GC content of 80-90%. In certain embodiments, homodimer formation is more stable than formation of other less stable primer dimer conformations formation (e.g., ΔΔG≦about −12, −13, −14, −15, −16, −17, −18, −19, −20, −25, −30, −35, −40 kcal/mol or more).

[0087] In particular, a primer of the invention having a 5′ tail sequence is useful in nicking amplification reactions. For use in nicking amplification reactions, the 5′ tail region comprises one or more nicking agent recognition sites and the 5′ tail region has a symmetrically inverted sequence. In some embodiments, the nick site is designed to be positioned between the nucleotide at the 3′ end of the 5′ tail region and the nucleotide at the 5′ end of the 3′ recognition region. Without being bound to theory, the nicking enzyme does not cleave at the nick site when the 3′ recognition is single-stranded. However, cleavage at the nick site occurs when the 3′ recognition region is double stranded (e.g., when the primer is incorporated into a double-stranded target nucleic acid molecule during the course of the nucleic acid amplification reaction).

[0088] In various embodiments, the 5′ tail sequence comprises from 5′ to 3′ an inverted nicking enzyme recognition sequence that is operatively linked to a palindromic sequence (or self-complementary sequence) that is operatively linked to a nicking enzyme recognition sequence. In certain embodiments, the spacer region is an even number of nucleotides (e.g., 2, 4, 6, etc.).

[0089] An exemplary 5′ tail based on the Nt.BstNBI nicking enzyme recognition sequence (5′-GAGTC-3′) having a 2 nucleotide spacer comprises a nucleic acid sequence according to the formula below:

5′-GACTCN₁N_{1′}GAGTC-3′

[0090] where “N” is any nucleotide (e.g., having an adenine (A), thymine (T), cytosine (C), or guanine (G) nucleobase), and N₁ is complementary to N_{1′}.

[0091] Exemplary sequences for such 2 base spacer tail sequences comprise, for example, the nucleic acid sequences according to the formulas below:

5′-GACTCN₁N_{1′}GAGTC-3′;
5′-GACTCN₁N_{1′}GAGTCN-3′;
5′-N₂GACTCN₁N_{1′}GAGTCN_{2′}-3′;
5′-N₂GACTCN₁N_{1′}GAGTCN_{2′}N-3′;
5′-N₃N₂GACTCN₁N_{1′}GAGTCN_{2′}N_{3′}-3′;
5′-N₃N₂GACTCN₁N_{1′}GAGTCN_{2′}N_{3′}N-3′;
5′-N₄N₃N₂GACTCN₁N_{1′}GAGTCN_{2′}N_{3′}N_{4′}-3′;
5′-N₄N₃N₂GACTCN₁N_{1′}GAGTCN_{2′}N_{3′}N_{4′}N-3′;
and
5′-N₅N₄N₃N₂GACTCN₁N_{1′}GAGTCN_{2′}N_{3′}N_{4′}N_{5′}-3′,

[0092] where “N” is any nucleotide (e.g., having an adenine (A), thymine (T), cytosine (C), or guanine (G) nucleobase), and N₁ is complementary to N_{1′}, N₂ to N_{2′}, N₃ to N_{3′}, N₄ to N_{4′}, and N₅ to N_{5′}, etc.

[0093] In some embodiments, 2 base spacer tails exclude those comprising the nucleic acid sequences according to the formulas below:

5′-TCGACTCN₁N_{1′}GAGTCGA-3′;
5′-TCGACTCN₁N_{1′}GAGTCGAN-3′;
5′-N₂TCGACTCN₁N_{1′}GAGTCGAN_{2′}-3′;
5′-N₂TCGACTCN₁N_{1′}GAGTCGAN_{2′}N-3′;
5′-GTCGACTCN₁N_{1′}GAGTCGAC-3′;
5′-GTCGACTCN₁N_{1′}GAGTCGACN-3′;
5′-N₃N₂TCGACTCN₁N_{1′}GAGTCGAN_{2′}N_{3′}-3′;
5′-N₃GTCGACTCN₁N_{1′}GAGTCGACN_{3′}-3′;
and
5′-AGTCGACTCN₁N_{1′}GAGTCGACT-3′,

where “N” is any nucleotide (e.g., having an adenine (A), thymine (T), cytosine (C), or guanine (G) nucleobase), and N₁ is complementary to N_{1′}, N₂ to N_{2′}, N₃ to N_{3′}, etc.

[0094] An exemplary 5′ tail based on the Nt.BstNBI nicking enzyme recognition sequence (5′-GAGTC-3′) having a 4 nucleotide spacer comprises a nucleic acid sequence according to the formula below:

5′-GACTCN₂N₁N_{1′}N_{2′}GAGTC-3′

[0095] where “N” is any nucleotide (e.g., having an adenine (A), thymine (T), cytosine (C), or guanine (G) nucleobase), and N₁ is complementary to N_{1′}, and N₂ is complementary to N_{2′}.

[0096] Exemplary sequences for such 4 base spacer tail sequences include, for example, the nucleic acid sequences according to the formulas below:

5′-GACTCN₂N₁N_{1′}N_{2′}GAGTC-3′;
5′-GACTCN₂N₁N_{1′}N_{2′}GAGTCN-3′;
5′-N₃GACTCN₂N₁N_{1′}N_{2′}GAGTCN_{3′}-3′;
5′-N₃GACTCN₂N₁N_{1′}N_{2′}GAGTCN_{3′}N-3′;
5′-N₄N₃GACTCN₂N₁N_{1′}N_{2′}GAGTCN_{3′}N_{4′}-3′;
5′-N₄N₃GACTCN₂N₁N_{1′}N_{2′}GAGTCN_{3′}N_{4′}N-3′;
5′-N₅N₄N₃GACTCN₂N₁N_{1′}N_{2′}GAGTCN_{3′}N_{4′}N_{5′}-3′;
5′-N₅N₄N₃GACTCN₂N₁N_{1′}N_{2′}GAGTCN_{3′}N_{4′}N_{5′}N-3′;
and
5′-N₆N₅N₄N₃GACTCN₂N₁N_{1′}N_{2′}GAGTCN_{3′}N_{4′}N_{5′}N_{6′}-3′,

[0097] where “N” is any nucleotide (e.g., having an adenine (A), thymine (T), cytosine (C), or guanine (G) nucleobase), and N₁ is complementary to N_{1′}, N₂ to N_{2′}, N₃ to N_{3′}, N₄ to N_{4′}, N₅ to N_{5′}, and N₆ to N_{6′}, etc.

[0098] In some embodiments, 4 base spacer tails exclude those comprising the nucleic acid sequences according to the formulas below:

5′-GACTCGATCGAGTC-3′;
5′-GAGTCGATCGAGTCN-3′;
5′-N₁GACTCGATCGAGTCN_{1′}-3′;
5′-N₁GACTCGATCGAGTCN_{1′}N-3′;
5′-N₂N₁GACTCGATCGAGTCN_{1′}N_{2′}-3′;
5′-N₂N₁GACTCGATCGAGTCN_{1′}N_{2′}N-3′;
5′-TCGACTCN₂N₁N_{1′}N_{2′}GAGTCGA-3′;
5′-TCGACTCN₂N₁N_{1′}N_{2′}GAGTCGAN-3′;
5′-N₃N₂N₁GACTCGATCGAGTCN_{1′}N_{2′}N_{3′}-3′;
5′-N₃N₂N₁GACTCGATCGAGTCN_{1′}N_{2′}N_{3′}N-3′;
5′-N₃TCGACTCN₂N₁N_{1′}N_{2′}GAGTCGAN_{3′}-3′;
5′-N₃TCGACTCN₂N₁N_{1′}N_{2′}GAGTCGAN_{3′}N-3′;
5′-GTCGACTCN₂N₁N_{1′}N_{2′}GAGTCGAC-3′;
5′-GTCGACTCN₂N₁N_{1′}N_{2′}GAGTCGACN-3′;
5′-N₄N₃N₂N₁GACTCGATCGAGTCN_{1′}N_{2′}N_{3′}N_{4′}-3′;
5′-N₄N₃TCGACTCN₂N₁N_{1′}N_{2′}GAGTCGACN_{3′}N_{4′}-3′;
5′-N₃GTCGACTCN₂N₁N_{1′}N_{2′}GAGTCGACN_{3′}-3′;
and
5′-AGTCGACTCN₂N₁N_{1′}N_{2′}GAGTCGACT-3′,

[0099] where “N” is any nucleotide (e.g., having an adenine (A), thymine (T), cytosine (C), or guanine (G) nucleobase), and N₁ is complementary to N_{1′}, N₂ to N_{2′}, N₃ to N_{3′}, etc.

[0100] An exemplary 5′ tail based on the Nt.BstNBI nicking enzyme recognition sequence (5′-GAGTC-3′) having a 6 nucleotide spacer comprises a nucleic acid sequence according to the formula below:

5′-GACTCN₃N₂N₁N_{1′}N_{2′}N_{3′}GAGTC-3′

[0101] where “N” is any nucleotide (e.g., having an adenine (A), thymine (T), cytosine (C), or guanine (G) nucleobase), and N₁ is complementary to N_{1′}, N₂ is complementary to N_{2′}, and N₃ is complementary to N_{3′}.

[0102] Exemplary sequences for such 6 base spacer tail sequences comprise, for example, the nucleic acid sequences according to the formulas below:

5′-GACTCN₃N₂N₁N_{1′}N_{2′}N_{3′}GAGTC-3′;
5′-GACTCN₃N₂N₁N_{1′}N_{2′}N_{3′}GAGTCN-3′;
5′-GACTCN₃N₂N₁N_{1′}N_{2′}N_{3′}GAGTCNN-3′;
5′-GACTCN₃N₂N₁N_{1′}N_{2′}N_{3′}GAGTCNNN-3′;
5′-GACTCN₃N₂N₁N_{1′}N_{2′}N_{3′}GAGTCNNNN-3′;
5′-N₄GACTCN₃N₂N₁N_{1′}N_{2′}N_{3′}GAGTCN_{4′}-3′;
5′-N₄GACTCN₃N₂N₁N_{1′}N_{2′}N_{3′}GAGTCN_{4′}N-3′;
5′-N₄GACTCN₃N₂N₁N_{1′}N_{2′}N_{3′}GAGTCN_{4′}NN-3′;
5′-N₄GACTCN₃N₂N₁N_{1′}N_{2′}N_{3′}GAGTCN_{4′}NNN-3′;
5′-N₅N₄GACTCN₃N₂N₁N_{1′}N_{2′}N_{3′}GAGTCN_{4′}N_{5′}-3′;
5′-N₅N₄GACTCN₃N₂N₁N_{1′}N_{2′}N_{3′}GAGTCN_{4′}N_{5′}N-3′;
5′-N₆N₅N₄GACTCN₃N₂N₁N_{1′}N_{2′}N_{3′}GAGTCN_{4′}N_{5′}N_{6′}-3′;
5′-N₆N₅N₄GACTCN₃N₂N₁N_{1′}N_{2′}N_{3′}GAGTCN_{4′}N_{5′}N_{6′}N-3′;
and
5′-N₇N₆N₅N₄GACTCN₃N₂N₁N_{1′}N_{2′}N_{3′}GAGTCN_{4′}N_{5′}N_{6′}N_{7′}-3′,

[0103] where “N” is any nucleotide (e.g., having an adenine (A), thymine (T), cytosine (C), or guanine (G) nucleobase), and N₁ is complementary to N_{1′}, N₂ to N_{2′}, N₃ to N_{3′}, N₄ to N_{4′}, N₅ to N_{5′}, N₆ to N_{6′}, and N₇ to N_{7′}, etc.

[0104] In some embodiments, 6 base spacer tails exclude those having the nucleic acid sequences according to the formulas below:

5′-GACTCGAN₁N_{1′}TCGAGTC-3′;
5′-GACTCGAN₁N_{1′}TCGAGTCN-3′;
5′-N₂GACTCGAN₁N_{1′}TCGAGTCN_{2′}-3′;
5′-N₂GACTCGAN₁N_{1′}TCGAGTCN_{2′}N-3′;
5′-N₃N₂GACTCGAN₁N_{1′}TCGAGTCN_{2′}N_{3′}-3′;
5′-N₃N₂GACTCGAN₁N_{1′}TCGAGTCN_{2′}N_{3′}N-3′;
5′-TCGACTCN₃N₂N₁N_{1′}N_{2′}N_{3′}GAGTCGA-3′;
5′-TCGACTCN₃N₂N₁N_{1′}N_{2′}N_{3′}GAGTCGAN-3′;
5′-N₄N₃N₂GACTCGAN₁N_{1′}TCGAGTCN_{2′}N_{3′}N_{4′}-3′;
5′-N₄N₃N₂GACTCGAN₁N_{1′}TCGAGTCN_{2′}N_{3′}N_{4′}N-3′;
5′-N₄GTCGACTCN₃N₂N₁N_{1′}N_{2′}N_{3′}GAGTCGACN_{4′}-3′;
5′-GTCGACTCN₃N₂N₁N_{1′}N_{2′}N_{3′}GAGTCGAC-3′;
5′-GTCGACTCN₃N₂N₁N_{1′}N_{2′}N_{3′}GAGTCGACN-3′;
5′-N₅N₄N₃N₂GACTCGAN₁N_{1′}TCGAGTCN_{2′}N_{3′}N_{4′}N_{5′}-3′;
5′-N₅N₄TCGACTCN₃N₂N₁N_{1′}N_{2′}N_{3′}GAGTCGAN_{4′}N_{5′}-3′;
5′-N₄GTCGACTCN₃N₂N₁N_{1′}N_{2′}N_{3′}GAGTCGACN_{4′}-3′;
and
5′-AGTCGACTCN₃N₂N₁N_{1′}N_{2′}N_{3′}GAGTCGACT-3′,

[0105] where “N” is any nucleotide (e.g., having an adenine (A), thymine (T), cytosine (C), or guanine (G) nucleobase), and N₁ is complementary to N_{1′}, N₂ to N_{2′}, N₃ to N_{3′}, N₄ to N_{4′}, N₅ to N_{5′}, etc.

[0106] Exemplary 5′ tail region sequences are provided at FIGS. 8A-8E. Exemplary 5′ tail region sequences 24 nucleotides in length having a Nt.BstNBI recognition sequence can be generated based on the following template 5′-NNNNGACTCNNNNNNGAGTCNNNN-3′ (FIG. 8A). Based on this template, there are 537,824 5′ tail sequences having the following properties: ΔG=−48 Kcal/mole to −62 kcal/mole; ΔΔG<−40 kcal/mole; and GC content 68% to 84%. Of these, 1050 selected sequences are provided, representing 0.2% of the entire sequence space (248,832). Exemplary 5′ tail region sequences 22 nucleotides in length having a Nt.BstNBI recognition sequence and based on the following template 5′-NNNNGACTCNNNNGAGTCNNNN-3′ (FIG. 8B). Based on this template, there are 248,832 5′ tail sequences having the following properties: ΔG=−47 Kcal/mole to −55 kcal/mole; ΔΔG<−40 kcal/mole; and GC content 72% to 82%. Of these, 200 selected sequences are provided, representing 0.08% of the entire sequence space (248,832).

### Nucleic Amplification Methods

[0107] Nucleic acid amplification technologies have provided a means of understanding complex biological processes, detection, and identification, of pathogenic and non-pathogenic organisms, forensic criminology analysis, disease association studies, and detection of events in genetically modified organisms, etc. The polymerase chain reaction (PCR) is a common thermal cycling dependent nucleic acid amplification technology used to amplify DNA consisting of cycles of repeated heating and cooling of the reaction for DNA melting and enzymatic replication of the DNA using a DNA polymerase. Real-Time quantitative PCR (qPCR) is a technique used to quantify the number of copies of a given nucleic acid sequence in a biological sample. Currently, qPCR utilizes the detection of reaction products in real-time throughout the reaction and compares the amplification profile to the amplification of controls which contain a known quantity of nucleic acids at the beginning of each reaction (or a known relative ratio of nucleic acids to the unknown tested nucleic acid). The results of the controls are used to construct standard curves, typically based on the logarithmic portion of the standard reaction amplification curves. These values are used to interpolate the quantity of the unknowns based on where their amplification curves compared to the standard control quantities.

[0108] In addition to PCR, non-thermal cycling dependent amplification systems or isothermal nucleic acid amplification technologies exist including, without limitation: Nicking Amplification Reaction, Rolling Circle Amplification (RCA), Helicase-Dependent Amplification (HDA), Loop-Mediated Amplification (LAMP), Strand Displacement Amplification (SDA), Transcription-Mediated Amplification (TMA), Self-Sustained Sequence Replication (3SR), Nucleic Acid Sequence Based Amplification (NASBA), Single Primer Isothermal Amplification (SPIA), Q-β Replicase System, and Recombinase Polymerase Amplification (RPA).

[0109] Isothermal nicking amplification reactions have similarities to PCR thermocycling. Like PCR, nicking amplification reactions employ oligonucleotide sequences which are complementary to a target sequences referred to as primers. In addition, nicking amplification reactions of target sequences results in a logarithmic increase in the target sequence, just as it does in standard PCR. Unlike standard PCR, the nicking amplification reactions progress isothermally. In standard PCR, the temperature is increased to allow the two strands of DNA to separate. In nicking amplification reactions, the target nucleic acid sequence is nicked at specific nicking sites present in a test sample. The polymerase infiltrates the nick site and begins complementary strand synthesis of the nicked target nucleotide sequence (the added exogenous DNA) along with displacement of the existing complimentary DNA strand. The strand displacement replication process obviates the need for thermal strand separation. At this point, primer molecules anneal to the displaced complementary sequence from the added exogenous DNA. The polymerase now extends from the 3′ end of the primer, creating a complementary strand to the previously displaced strand. The second primer oligonucleotide then anneals to the newly synthesized complementary strand and is extended making a duplex of DNA which includes the nicking agent recognition sequence. This strand is then liable to be nicked with subsequent strand displacement extension by the polymerase, which leads to the production of an interim amplicon of duplex of DNA which has nick sites on either side of the original target DNA. Once this interim amplicon is synthesized, the molecule continues to be amplified exponentially through replication of the displaced strands with new primer molecules. In addition, amplification also proceeds linearly from each product molecule through the repeated action of the nick translation synthesis at the template introduced nick sites. The result is a very rapid increase in target signal amplification; much more rapid than as produced by PCR thermocycling, with amplification results in less than ten minutes.

### Nicking Agent-Dependent Isothermal Nucleic Acid Amplification Assays

[0110] The invention provides for the detection of target nucleic acid molecules amplified in an isothermal nicking amplification assay. Polymerases useful in the methods described herein are capable of catalyzing the incorporation of nucleotides to extend a 3′ hydroxyl terminus of an oligonucleotide (e.g., a primer) bound to a target nucleic acid molecule and/or a 3′ hydroxyl terminus at a nick site in a double-stranded DNA molecule in conjunction with strand displacement activity. Such polymerases also lack or have substantially reduced 5′-3′ exonuclease activity and may include those that are thermophilic. DNA polymerases useful in methods involving primers having 2′-modified nucleotides in the primer region comprising the six 3′-terminal nucleotides include derivatives and variants of the DNA polymerase I isolated from Bacillus stearothermophilus, also classified as Geobacillus stearothermophilus, and from closely related bacterial strains, isolates and species comprising the genus Geobacillus, which lack or have substantially reduced 5′-3′ exonuclease activity and have strand-displacement activity. Exemplary polymerases include, but are not limited to the large fragments of Bst DNA polymerase I, Gst DNA polymerase I, Gka DNA polymerase I.

[0111] A nicking agent useful in methods described herein is a chemical entity capable of recognizing and binding to a specific structure in double stranded nucleic acid molecules and cleaving a phosphodiester bond between adjoining nucleotides on the top strand with a substantially higher rate than cleaving the phosphodiester bond between adjoining nucleotides on the bottom strand upon binding to its recognized specific structure, thereby creating a free 3′-hydroxyl group on the terminal nucleotide preceding the nick site that can be extended by a 5′-3′-exonuclease deficient strand displacement polymerase. In a preferred embodiment of the methods disclosed herein, the top strand phosphodiester bond cleavage rate of the “nicking agent” approaches 100%, while the cleavage rate of the bottom strand phosphodiester bond approaches 0%. Nicking agents useful in methods described herein, can either be enzymes, i.e. self-regenerating catalysts turning over multiple substrate molecules, or non-regenerating catalysts turning over just a single substrate molecule at an equimolar ratio.

[0112] A nicking enzyme binds double-stranded DNA and cleaves one strand of a double-stranded duplex. In the methods of the invention, the nicking enzyme cleaves the top stand (the strand comprising the 5′-3′ sequence of the nicking agent recognition site). The nicking enzyme may cleave either upstream or downstream of the binding site or nicking enzyme recognition site. In a particular embodiment of the invention disclosed herein, the nicking enzyme cleaves the top strand only and 3′ downstream of the recognition site. In exemplary embodiments, the reaction comprises the use of a nicking enzyme that cleaves or nicks downstream of the binding site such that the product sequence does not contain the nicking site. Using an enzyme that cleaves downstream of the binding site allows the polymerase to more easily extend without having to displace the nicking enzyme. Ideally, the nicking enzyme is functional under the same reaction conditions as the polymerase. Exemplary nicking enzymes include, but are not limited to, N.Bst9I, N.BstSEI, Nb.BbvCI(NEB), Nb.Bpu10I(Fermantas), Nb.BsmI(NEB), Nb.BsrDI(NEB), Nb.BtsI(NEB), Nt.AlwI(NEB), Nt.BbvCI(NEB), Nt.Bpu10I(Fermentas), Nt.BsmAI, Nt.BspD6I, Nt.BspQI(NEB), Nt.BstNBI(NEB), and Nt.CviPII(NEB). Sequences of nicking enzyme recognition sites are provided at Table 1.

TABLE 1
Nicking enzyme recognition sequences

| | |
|---|---|
| N.Bst9I | 5′-GAGTCNNNNN↓NN-3′ |
| | \|\|\|\|\|\|\|\|\|\| \|\| |
| | 3′-CTCAGNNNNN•NN-5′ |
| N.BstSEI | 5′-GAGTNCNNNN↓NN-3′ |
| | \|\|\|\|\|\|\|\|\|\| \|\| |
| | 3′-CTCAGNNNNN•NN-5′ |
| Nb.BbvCI(NEB) | 5′-CCTCA•GC-3′ |
| | \|\|\|\|\| \|\| |
| | 3′-GGAGT↑CG-5′ |
| Nb.Bpu10I(Fermantas) | 5′-CCTNA•GC-3′ |
| | \|\|\|\|\| \|\| |
| | 3′-GGANT↑CG-5′ |
| Nb.BsmI(NEB) | 5′-GAATG•CN-3′ |
| | \|\|\|\|\| \|\| |
| | 3′-CTTAC↑GN-5′ |
| Nb.BsrDI(NEB) | 5′-GCAATG•NN-3′ |
| | \|\|\|\|\|\| \|\| |
| | 3′-CGTTAC↑NN-5′ |
| Nb.BtsI(NEB) | 5′-GCAGTG•NN-3′ |
| | \|\|\|\|\|\| \|\| |
| | 3′-CGTCAC↑NN-5′ |
| Nt.AlwI(NEB) | 5′-GGATCNNNN↓N-3′ |
| | \|\|\|\|\|\|\|\|\| \| |
| | 3′-CCTAGNNNN•N-5′ |
| Nt.BbvCI(NEB) | 5′-CC↓TCAGC-3′ |
| | \|\| \|\|\|\|\| |
| | 3′-GG•AGTCG-5 ′ |
| Nt.Bpu10I(Fermentas) | 5′-CC↓TNAGC-3 ′ |
| | \|\| \|\|\|\|\| |
| | 3′-GG•ANTCG-5′ |
| Nt.BsmAI | 5′-GTCTCN↓N-3′ |
| | \|\|\|\|\|\| \| |
| | 3′-CAGAGN•N-5′ |
| Nt.BspD6I | 5′-GAGTCNNNN↓N-3′ |
| | \|\|\|\|\|\|\|\|\| \| |
| | 3′-CTCAGNNNN•N-5′ |
| Nt.BspQI(NEB) | 5′-GCTCTTCN↓-3′ |
| | \|\|\|\|\|\|\|\| |
| | 3′-CGAGAAGN -5′ |
| Nt.BstNBI(NEB) | 5′-GAGTCNNNN↓N-3′ |
| | \|\|\|\|\|\|\|\|\| \| |
| | 3′-CTCAGNNNN•N-5′ |
| Nt.CviPII(NEB) | 5′-↓CCD-3′ |
| | \|\|\| |
| | 3′- GGH-5′ |

Nicking enzymes also include engineered nicking enzymes created by modifying the cleavage activity of restriction endonucleases (NEB expressions July 2006, vol 1.2). when restriction endonucleases bind to their recognition sequences in DNA, two catalytic sites within each enzyme for hydrolyzing each strand drive two independent hydrolytic reactions which proceed in parallel. Altered restriction enzymes can be engineered that hydrolyze only one strand of the duplex, to produce DNA molecules that are “nicked” (3′-hydroxyl, 5′-phosphate), rather than cleaved. Nicking enzymes may also include modified CRISPR/Cas proteins, Transcription activator-like effector nucleases (TALENs), and Zinc-finger nucleases having nickase activity.

[0113] A nicking amplification reaction typically comprises nucleotides, such as, for example, dideoxyribonucleoside triphosphates (dNTPs). The reaction may also be carried out in the presence of dNTPs that comprise a detectable moiety including but not limited to a radiolabel (e.g., ³²P, ³³P, ¹²⁵I, ³⁵S) an enzyme (e.g., alkaline phosphatase), a fluorescent label (e.g., fluorescein isothiocyanate (FITC)), biotin, avidin, digoxigenin, antigens, haptens, or fluorochromes. The reaction further comprises certain salts and buffers that provide for the activity of the nicking enzyme and polymerase.

[0114] Advantageously, the nicking amplification reaction is carried out under substantially isothermal conditions where the temperature of the reaction is more or less constant during the course of the amplification reaction. Because the temperature does not need to be cycled between an upper temperature and a lower temperature, the nicking amplification reaction can be carried out under conditions where it would be difficult to carry out conventional PCR. Typically, the reaction is carried out at about between 35° C. and 90° C. (e.g., about 35, 37, 42, 55, 60, 65, 70, 75, 80, or 85° C.). Advantageously, it is not essential that the temperature be maintained with a great degree of precision. Some variability in temperature is acceptable.

[0115] Sets of primers for amplification reactions are selected having ΔΔG's≦−15, −16, 17, −18, −19, −20, −25, −30 kcal/mole or more. The performance characteristics of amplification reactions may be altered by increasing the concentration of one or more oligonucleotides (e.g., one or more primers and/or probes) and/or their ratios. High concentrations of primers also favor primer-dimer formation. In various embodiments, concentration of a primers is 100, 200, 300, 400, 500, 600, 700, 800, 900, 1000 nM or more. Melt temperature (Tm) and reaction rate modifiers may also be used to lower the melting temperature of the oligonucleotides, such as (but not limited to) ethylene glycol and glycerol. In addition, DNA polymerase reaction rate modifiers (such as dNTP and magnesium concentration) may be used to alter the reaction rate. In particular embodiments, the 5′ tail sequences of the forward and reverse primers have the same nucleic acid sequence.

[0116] The invention also provides a method of designing a nicking agent-dependent isothermal strand-displacement amplification assay without experimental screening of a multitude of combinations of candidate forward primers and/or candidate reverse primers. A 35 to 70 bp long region within the target sequence is identified having a 12 to 20 bp sequence in the central portion with a Tm≧the assay temperature (e.g., ˜55° C.). Adjacent sequences 12 bp to 20 bp long immediately downstream and upstream of the 15 to 20 bp long central region are identified, according to the above criteria. The Tm of the chosen double stranded downstream and upstream adjacent sequences deviate from each other by less than ±3° C. A target-specific pair of forward and reverse primers are created by attaching a 5′-tail region for a stable dimer-forming primer to the 5′-terminus of the 12-20 base upstream adjacent sequence and to the 5′-terminus of the complementary strand of the 12-20 base downstream adjacent sequence. When combining the forward primer, reverse primer, and a probe, the primer driving the synthesis of the strand complementary to the probe is in excess over the other primer at a molar ratio of about 1.1:1 to 10:1. The combined concentration of a primer in the assay is no higher than 1000 nM. The assay design method can also be used to convert a pre-validated PCR assay for an amplicon ≦70 bp to an nicking agent-dependent isothermal strand-displacement amplification assay.

### Target Nucleic Acid Molecules

[0117] Methods and compositions of the invention are useful for the amplification and/or identification of a target nucleic acid molecule in a test sample. The target sequences is amplified from virtually any samples that comprises a target nucleic acid molecule, including but not limited to samples comprising fungi, spores, viruses, or cells (e.g., prokaryotes, eukaryotes). In specific embodiments, compositions and methods of the invention detect Clavibacter michiganensis subsp. michiganensis, Clavibacter michiganensis subsp. sepedonicus, Pseudomonas syringae pv Tomato, Xanthomonas campestris pv Vesicatoria, Alternaria spp, Cladosporium spp, Fusarium oxysporum, Verticilium dahlia, Pseudomonas currugata, Erwina carotovora, and Ralstonia solanacearum. Exemplary test samples include body fluids (e.g. blood, serum, plasma, amniotic fluid, sputum, urine, cerebrospinal fluid, lymph, tear fluid, feces, or gastric fluid), tissue extracts, culture media (e.g., a liquid in which a cell, such as a pathogen cell, has been grown), environmental samples, agricultural products or other foodstuffs, and their extracts, and DNA identification tags. If desired, the sample is purified prior to inclusion in a nicking amplification reaction using any standard method typically used for isolating a nucleic acid molecule from a biological sample.

[0118] In one embodiment, primers amplify a target nucleic acid of a pathogen to detect the presence of a pathogen in a sample. Exemplary pathogens include fungi, bacteria, viruses and yeast. Such pathogens may be detected by identifying a nucleic acid molecule encoding a pathogen protein, such as a toxin, in a test sample. Exemplary toxins include, but are not limited to aflatoxin, cholera toxin, diphtheria toxin, Salmonella toxin, Shiga toxin, Clostridium botulinum toxin, endotoxin, and mycotoxin. For environmental applications, test samples may include water, liquid extracts of air filters, soil samples, building materials (e.g., drywall, ceiling tiles, wall board, fabrics, wall paper, and floor coverings), environmental swabs, or any other sample. In one embodiment, primer oligonucleotides amplify a target nucleic acid of a plant used as an internal control in molecular breeding experiments geared towards improving, for example, the plant's resistance to drought, the plant's resistance to herbicides, or to predation by harmful insects.

[0119] Target nucleic acid molecules include double-stranded and single-stranded nucleic acid molecules (e.g., DNA, and other nucleobase polymers known in the art capable of hybridizing with a nucleic acid molecule described herein). DNA molecules suitable for detection with a detectable oligonucleotide probe or primer of the invention include, but are not limited to, double stranded DNA (e.g., genomic DNA, plasmid DNA, mitochondrial DNA, viral DNA, and synthetic double stranded DNA). Single-stranded DNA target nucleic acid molecules include, for example, viral DNA, cDNA, and synthetic single-stranded DNA, or other types of DNA known in the art.

[0120] In general, a target sequence for detection is between 10 and 100 nucleotides in length (e.g., 10, 15, 20, 25, 30, 35, 40, 45, 50, 60, 70, 80, 90, 100 nucleotides. The GC content of the target nucleic acid molecule is selected to be less than about 45, 50, 55, or 60%. Desirably, the target sequence and nicking enzymes are selected such that the target sequence does not contain nicking sites for any nicking enzymes that will be included in the reaction mix.

### Applications

[0121] Target nucleic acid amplification using primers of the invention have characteristics useful for rapid detection of target nucleic acids (FIG. 10). Such reactions are characterized by a high signal-to-noise ratio ([RFU_{MAX}−RFU_{BL}]), steep slope (high value of [RFU_{MAX}−RFU_{BL}]/[T_{OSEA}−T_{RFUmax}]), early onset of the exponential amplification phase (T_{OSEA}<10 min) and low signal variance between replicated assay reactions of the same sample. In certain embodiments, T_{OSEA}−T_{RFUmax}≈3 min.

[0122] The present invention provides for the real-time monitoring of the isothermic amplification reaction. Compositions and methods of the invention are useful in human diagnostics, where rapid detection is desired (e.g., detectable amplification in under 20, 15, 10, 9, 8, 7, 6, 5 min. or less). In particular embodiments, the invention provides for the use of nicking amplification reaction assays in human diagnostics in clinical settings. In other embodiments, the invention provides for the use of nicking amplification reaction assays in diagnostic field work, where access to thermocycling equipment is unavailable or would be prohibitively expensive. In still other embodiments, the invention provides for the use of nicking amplification reaction assays in an academic setting where rapid nucleic acid amplification and detection are desired.

### Detectable Oligonucleotide Probes

[0123] The present invention provides for the detection of target nucleic acid molecules or amplicons thereof in a nicking amplification reaction using non-amplifiable detectable polynucleotide probes comprising at least one polymerase-arresting molecule (e.g., nucleotide modification or other moiety that renders the oligonucleotide capable of binding a target nucleic acid molecule, but incapable of supporting polymerase extension utilizing the detectable oligonucleotide probe as a target). Without wishing to be bound by theory, the presence of one or more moieties which does not allow polymerase progression likely causes polymerase arrest in non-nucleic acid backbone additions to the oligonucleotide or through stalling of a replicative polymerase (i.e. C3-spacer, damaged DNA bases, other spacer moiety, O-2-Me bases). These constructs thus prevent or reduce illegitimate amplification of the probe during the course of a nicking amplification reaction. This distinguishes them from conventional detection probes, which must be added at the end of the nicking amplification reaction to prevent their amplification.

[0124] Conventional detection probes have proven impractical for detecting a nicking amplification reaction in real time. If conventional detection probes are incorporated into the nicking amplification reaction, these conventional detection probes are amplified concurrently with the target. The amplification of these detection molecules masks the detection of legitimate target amplicons due to the number of starting molecules of the detection probe at the start of the reaction.

[0125] The invention provides non-amplifiable detectable polynucleotide probe that comprise least one polymerase-arresting molecule. A polymerase-arresting molecule of the invention includes, but is not limited to, a nucleotide modification or other moiety that blocks extension by replicative DNA polymerases, thereby preventing the amplification of detection molecules; but can allow proper hybridization or nucleotide spacing to the target molecule or amplified copies of the target molecule. In one embodiment, a detectable oligonucleotide probe of the invention comprises a 3 carbon spacer (C3-spacer) that prevents or reduces the illegitimate amplification of a detection molecule.

[0126] In one embodiment, a detectable oligonucleotide probe comprises one or more modified nucleotide bases having enhanced binding affinity to a complementary nucleotide. Examples of modified bases include, but are not limited to 2′ Fluoro amidites, and 2′OMe RNA amidites (also functioning as a polymerase arresting molecule). Detectable oligonucleotide probes of the invention can be synthesized with different colored fluorophores and may be designed to hybridize with virtually any target sequence. In view of their remarkable specificity, a non-amplifiable detectable polynucleotide probe of the invention is used to detect a single target nucleic acid molecule in a sample, or is used in combination with detectable oligonucleotide probes each of which binds a different target nucleic acid molecule. Accordingly, the non-amplifiable detectable polynucleotide probes of the invention may be used to detect one or more target nucleic acid molecules in the same reaction, allowing these targets to be detected simultaneously. The present invention encompasses the use of such fluorophores in conjunction with the detectable oligonucleotide probes described herein.

### Use of Non-Amplifiable Detectable Polynucleotide Probes

[0127] Non-amplifiable detectable polynucleotide probe are useful in methods for amplifying and detecting a target nucleic acid molecule in a nicking amplification reaction. The method involves contacting a target nucleic acid molecule under substantially isothermal conditions with a polymerase, two primers, each of which specifically binds to a complementary sequence on the target nucleotide molecule, a nicking enzyme, and the detectable oligonucleotide probe in the presence of a suitable buffer and dNTPs, generating amplicons comprising at least a portion of said target nucleic acid molecule; and detecting the target nucleic acid molecule present in the reaction by detecting the oligonucleotide probe that hybridizes to the target nucleic acid molecule in real time during the reaction based on fluorescent intensity from the probe molecules in the reaction. Advantageously, such methods are useful for monitoring nicking amplification reactions in real time.

[0128] In general, non-amplifiable detectable polynucleotide probes of the invention are included in a nicking amplification reaction that comprises (1) a target nucleic acid molecule; (2) two primers comprising some number of oligonucleotides that are complementary to the target nucleic acid molecule and a site that can be cleaved by a nicking enzyme; (3) dNTPs; (4) a strand displacing polymerase; and (5) a nicking enzyme. Accordingly, the invention provides a method of using these components to detect a target nucleic acid molecule.

Implementation in Hardware and/or Software

[0129] The methods described herein can be implemented on general-purpose or specially programmed hardware or software. For example, the methods can be implemented by a computer readable medium. Accordingly, the present invention also provides a software and/or a computer program product configured to perform the algorithms and/or methods according to any embodiment of the present invention. It is well-known to a skilled person in the art how to configure software which can perform the algorithms and/or methods provided in the present invention. The computer-readable medium can be non-transitory and/or tangible. For example, the computer readable medium can be volatile memory (e.g., random access memory and the like) or non-volatile memory (e.g., read-only memory, hard disks, floppy discs, magnetic tape, optical discs, paper table, punch cards, and the like). The computer executable instructions may be written in a suitable computer language or combination of several languages. Basic computational biology methods are described in, for example Setubal and Meidanis et al., Introduction to Computational Biology Methods (PWS Publishing Company, Boston, 1997); Salzberg, Searles, Kasif, (Ed.), Computational Methods in Molecular Biology, (Elsevier, Amsterdam, 1998); Rashidi and Buehler, Bioinformatics Basics: Application in Biological Science and Medicine (CRC Press, London, 2000) and Ouelette and Bzevanis Bioinformatics: A Practical Guide for Analysis of Gene and Proteins (Wiley & Sons, Inc., 2^{nd} ed., 2001).

[0130] The present invention may also make use of various computer program products and software for a variety of purposes, such as probe design, management of data, analysis, and instrument operation. (See, U.S. Pat. Nos. 5,593,839, 5,795,716, 5,733,729, 5,974,164, 6,066,454, 6,090,555, 6,185,561, 6,188,783, 6,223,127, 6,229,911 and 6,308,170.) Additionally, the present invention may have preferred embodiments that include methods for providing genetic information over networks such as the Internet as shown in U.S. Ser. Nos. 10/197,621, 10/063,559 (US Pub No 20020183936), Ser. Nos. 10/065,856, 10/065,868, 10/328,818, 10/328,872, 10/423,403, and 60/482,389.

### Kits

[0131] The invention also provides kits for the amplification of a target nucleic acid molecule. Such kits are useful for the amplification and detection of a target nucleic acid in a biological sample obtained from a subject. Kits of the present invention may comprise, for example, one or more polymerases, forward and reverse primers, and one or more nicking enzymes, as described herein. Where one target is to be amplified, one or two nicking enzymes may be included in the kit. Where multiple target sequences are to be amplified, and the primers designed for those target sequences comprise the nicking enzyme sites for the same nicking enzyme, then one or two nicking enzymes may be included. Where the primers are recognized by different nicking enzymes, more nicking enzymes may be included in the kit, such as, for example, 3 or more.

[0132] In one aspect, the invention provides a kit for nucleic acid amplification comprising a DNA polymerase; a primary primer, a secondary primer, a nicking enzyme with specificity to a nicking enzyme binding site within the primers, and deoxynucleotide triphosphates (dNTP's) (e.g., in a buffered solution containing components sufficient for amplification. In various embodiments, the primary primer and secondary primer, each have a 3′-end specific recognition region sequence complementary or substantially complementary to the target sequence, where the end specific recognition region comprises one or more 2′ modified nucleotides; a 5′-end tail region containing a nicking enzyme binding site upstream of the 3′-end specific recognition region sequences that is able to dimerize with itself (e.g., self-complementary). In particular embodiments, one or more primers are in a primer-dimer configuration (e.g., produced by heating about Tm and slow cooling).

[0133] The kits of the present invention may also comprise one or more of the components in any number of separate containers, packets, tubes (e.g., <0.2 ml, 0.2 ml, 0.6 ml, 1.5 ml, 5.0 ml, >5.0 ml), vials, microtiter plates (e.g., <96-well, 96-well, 384-well, 1536-well, >1536-well), ArrayTape, and the like, or the components may be combined in various combinations in such containers. In various embodiments, the kit further comprises a pair of primers capable of binding to and amplifying a reference sequence. In particular embodiments, the kit comprises one or more primers in a primer-dimer configuration (e.g., produced by heating about Tm and slow cooling). In yet other embodiments, the kit comprises a sterile container which contains the primers; such containers can be boxes, ampules, bottles, vials, tubes, bags, pouches, blister-packs, or other suitable container form known in the art. Such containers can be made of plastic, glass, laminated paper, metal foil, or other materials suitable for holding nucleic acids.

[0134] The components of the kit may, for example, be present in one or more containers, for example, all of the components may be in one container, or, for example, the enzymes may be in a separate container from the primers. The components may, for example, be dried (e.g., powder) or in a stable buffer (e.g., chemically stabilized, thermally stabilized). Dry components may, for example, be prepared by lyophilization, vacuum and centrifugal assisted drying and/or ambient drying. In various embodiments, the polymerase and nicking enzymes are in lyophilized form in a single container, and the primers are either lyophilized, freeze dried, or in buffer, in a different container. In some embodiments, the polymerase, nicking enzymes, and the primers are, in lyophilized form, in a single container. In other embodiments, the polymerase and the nicking enzyme may be separated into different containers.

[0135] Kits may further comprise, for example, dNTPs used in the reaction, or modified nucleotides, cuvettes or other containers used for the reaction, or a vial of water or buffer for re-hydrating lyophilized components. The buffer used may, for example, be appropriate for both polymerase and nicking enzyme activity.

[0136] The kits of the present invention may also comprise instructions for performing one or more methods described herein and/or a description of one or more compositions or reagents described herein. Instructions and/or descriptions may be in printed form and may be included in a kit insert. A kit also may include a written description of an Internet location that provides such instructions or descriptions.

[0137] Kits may further comprise reagents used for detection methods (e.g., real-time or endpoint), such as, for example, hybridization probes or DNA binding dyes. Kits may further comprise reagents used for detection methods, such as, for example, reagents used for FRET, lateral flow devices, dipsticks, fluorescent dye, colloidal gold particles, latex particles, a molecular beacon, or polystyrene beads. Detection components may be incorporated into a lateral flow device. The lateral flow device may be used at a point of care.

[0138] The practice of the present invention employs, unless otherwise indicated, conventional techniques of molecular biology (including recombinant techniques), microbiology, cell biology, biochemistry and immunology, which are well within the purview of the skilled artisan. Such techniques are explained fully in the literature, such as, “Molecular Cloning: A Laboratory Manual”, second edition (Sambrook, 1989); “Oligonucleotide Synthesis” (Gait, 1984); “Animal Cell Culture” (Freshney, 1987); “Methods in Enzymology” “Handbook of Experimental Immunology” (Weir, 1996); “Gene Transfer Vectors for Mammalian Cells” (Miller and Calos, 1987); “Current Protocols in Molecular Biology” (Ausubel, 1987); “PCR: The Polymerase Chain Reaction”, (Mullis, 1994); “Current Protocols in Immunology” (Coligan, 1991). These techniques are applicable to the production of the polynucleotides and polypeptides of the invention, and, as such, may be considered in making and practicing the invention. Particularly useful techniques for particular embodiments will be discussed in the sections that follow.

[0139] The following examples are put forth so as to provide those of ordinary skill in the art with a complete disclosure and description of how to make and use the assay, screening, and therapeutic methods of the invention, and are not intended to limit the scope of what the inventors regard as their invention.

### Examples

### Example 1

### Design of a System for Isothermal DNA Amplification of Soy Lectin by Determining Stability of Primer Target Binding

[0140] A successful working isothermal DNA amplification assay for detection of Soy Lectin was created using no more than the design principles in accordance with the invention and without the aid of experimental testing of the primers (FIG. 12).

[0141] An assay target sequence in the Soy Lectin gene was selected based on the absence of single nucleotide polymorphisms (SNP's) in a 30 to 60 bp sequence window:

5′-ccaaggttctcattacctatgatgcctccaccagcctcttggttg
cttctttggtctacccttcacagagaa-3′

Shown in bold are the sequence regions selected for design of the forward and reverse primers, respectively.

[0142] For selecting the target binding sequence of the Forward primer (5′-ATTACCTATGATGCC-3′), the stability of Forward primer binding to target was compared to the stability of Forward primer self-dimerization, as follows:

[0143] ΔG_{25° C.} of Forward Primer-Target Hybrid (PrTH)=−25.99 kcal/mole;

[0144] ΔG_{25° C.} of Primer-Target binding region self dimer (PrTBRHD)=−3.14 kcal/mole;

[0145] ΔΔG_{25° C.}=ΔG_{PTH}−ΔG_{PTBRHD}=−22.85 kcal/mole.

A low ΔΔG (≦about −16 kcal/mole) indicates that the Forward primer is capable of annealing to and initiating synthesis of the complementary strand of the target nucleic acid molecule.

[0146] For selecting the target binding sequence of the Reverse primer (5′-ACCAAAGAAGCAAC-3′), the stability of Reverse primer binding to target was compared to the stability of Reverse primer self-dimerization, as follows:

[0147] The stability (ΔG) and relative stability to nearest (ΔΔG) of the target binding region of the Reverse primer 5′-ACCAAAGAAGCAAC-3′ was determined as follows:

[0148] ΔG_{25° C.} of rev Primer-Target Hybrid (PrTH)=−25.35 kcal/mole;

[0149] ΔG_{25° C.} of Primer-Target binding region self dimer (PrTBRHD)=−3.14 kcal/mole;

[0150] ΔΔG_{25° C.}=ΔG_{PTH}−ΔG_{PTBRHD}=−22.21 kcal/mole.

A low ΔΔG (≦about −16 kcal/mole) indicates that the Reverse primer is capable of annealing to and initiating synthesis of the complementary strand of the target nucleic acid molecule.

[0151] Nicking amplification reactions (50 μl) contained 0.3 mM dNTPs, 0.38 U/ml Bst 2.0 WarmStart DNA Polymerase (New England Biolabs), 0.15 units Nt.BstNBI (New England Biolabs), 250 nM forward primer, 250 nM reverse primer, 200 nM molecular beacon probe labeled at the 5′-terminus with CalRed (BioSearch) and at the 3′-terminus with BHQ2 (BioSearch), and Glycine max genomic DNA (10,000 copies). Primer and probe sequences (synthesized by BioSearch Inc., Novato, Calif.) were as follows:

Forward primer (″m″ = 2′-methoxy nucleotide)
5′-ACGCGACTCGTCGACGAGTCGCGTATTACCTATGAmUmGmCmC-3′
Reverse primer (″m″ = 2′-methoxy nucleotide)
5′-ACGCGACTCGTCGACGAGTCGCGTACCAAAGAAmGmCmAmAmC-3′
Molecular beacon probe (″I″ stands for universal
inosine nucleotide)
5′-CalRed₆₁₀-CGCGCTCCACCAICCTCTTGCGCG-BHQ2-3′

[0152] Reactions were incubated at 56° C. for approximately 10 minutes on an IQ5 thermo cycler (BioRad). Fluorescent signal was recorded on ROX channel (excitation: 575 nm; emission: 602 nm). Reactions containing soy gDNA (n=3) generated sigmoid-shaped curves (FIG. 13). In contrast control reactions containing no target DNA (n=3) generated no signal. Time to onset of exponential amplification was about 3 minutes and time to onset of maximum relative fluorescence units was about 6 minutes. The Ø slope of the exponential amplification phase of the reactions was determined to be 660 RFU/min.

### Example 2

### Design of a System for Isothermal DNA Amplification of Salmonella enterica invA by Determining Stability of Primer Target Binding

[0153] A readily, operational isothermal DNA amplification assay for detection of Salmonella enterica invA was created using no more than the design principles in accordance with the invention and without the aid of further experimental testing of the primers.

[0154] An assay target sequence in the Salmonella enterica invA gene was selected based on the absence of single nucleotide polymorphisms (SNP's) in a 30 to 60 bp sequence window:

5′-ATACTCATCTGTTTACCGGGCATACCATCCAGAGAAAA-3′

Shown in bold are the sequence regions selected for design of the forward and reverse primers, respectively.

[0155] For selecting the target binding sequence of the Forward primers (5′-ATACTCATCTGTTTACC-3′), the stability of Forward primer binding to target was compared to the stability of Forward primer self-dimerization, as follows:

[0156] ΔG_{25° C.} of fwd Primer-Target Hybrid (PTH)=−26.11 kcal/mole;

[0157] ΔG_{25° C.} of Primer-Target binding region self dimer (PTBRHD)=−1.95 kcal/mole;

[0158] ΔΔG_{25° C.}=DG_{PTH}−ΔG_{PTBRHD}=−24.16 kcal/mole

A low ΔΔG (≦about −16 kcal/mole) indicates that the Forward primers are capable of annealing to and initiating synthesis of the complementary strand of the target nucleic acid molecule.

[0159] For selecting the target binding sequence of the Reverse primer (5′-TTTTCTCTGGATGG-3′), the stability of Reverse primer binding to target was compared to the stability of Reverse primer self-dimerization, as follows:

[0160] ΔG_{25° C.} of rev Primer-Target Hybrid (PTH)=−25.28 kcal/mole;

[0161] ΔG_{25° C.} of Primer-Target binding region self dimer (PTBRHD)=−1.57 kcal/mole;

[0162] ΔΔG_{25° C.}=ΔG_{PTH}−ΔG_{PTBRHD}=−23.71 kcal/mole.

A low ΔΔG (≦about −16 kcal/mole) indicates that the Reverse primer is capable of annealing to and initiating synthesis of the complementary strand of the target nucleic acid molecule.

[0163] Nucleic Acid Amplification Reactions (26 μl) contained 0.3 mM dNTPs, 0.38 U/ml Bst 2.0 WarmStart DNA Polymerase (New England Biolabs), 0.15 units Nt.BstNBI (New England Biolabs), 250 nM forward primer, 250 nM reverse primer, 300 nM molecular beacon probe labeled at the 5′-terminus with CalRed (BioSearch) and at the 3′-terminus with BHQ2 (BioSearch), and Salmonella genomic DNA (10,000 copies). Primer and probe sequences (synthesized by BioSearch Inc., Novato, Calif.) are as follows:

Forward primer 1 (″m″ = 2′-methoxy nucleotide)
5′-GGCTGACTCCTGCAGGAGTCAGCCATACTCATCTGmUmUmUmAm
CmC-3′
Forward primer 2 (″m″ = 2′-methoxy nucleotide)
5′-GGCTGACTCCTGCAGGAGTCAGCCATACTCATCTGTmUmUmAm
CmC-3′
Reverse primer (″m″ = 2′-methoxy nucleotide)
5′-GGCTGACTCCTGCAGGAGTCAGCCTTTTCTCTGmGmAmUmGmG-3′
Molecular beacon probe (″I″ stands for universal
inosine nucleotide)
5′-CalRed₆₁₀-ACCTGTTTACCGGGCATACAAACAGGT-BHQ2-3′

[0164] Reactions were incubated at 56° C. for approximately 10 minutes on an IQ5 thermo cycler (BioRad). Fluorescent signal was recorded on ROX channel (excitation: 575 nm; emission: 602 nm). Reactions containing soy gDNA (n=3) generated sigmoid-shaped curves (FIG. 15). In contrast control reactions containing no target DNA (n=3) generated no signal. Time to onset of exponential amplification was about 3 minutes and time to onset of maximum relative fluorescence units was about 6 minutes. The 0 slope of the exponential amplification phase of the reactions was determined to be 660 RFU/min.

[0165] The results of assay optimization are shown in FIGS. 16A and 16B.

### Example 3

### Identification of ΔΔG as a Relative Thermodynamic Parameter Correlating with Performance of Candidate Primer/Probe Sets Designed for Isothermal Amplification Assays. Determination of a Threshold Values Predicting Success or Failure of a Primer Oligonucleotide in a Primer/Probe Set Designed in Silico

[0166] A set of 34 oligonucleotide primers comprising in 5′-3′ direction a self-complementary first region (5′-tail with the nicking enzyme recognition sequence) and a target sequence complementary second region were analyzed for a multitude of parameters commonly used in primer design algorithms, such as melting temperature (T_{M}) of the hybrid duplex, % GC content, sequence length and ΔG. All parameters were determined separately for the first and second primer regions, respectively. A subset of 25 primers belonged to verified functional isothermal DNAble® assays. A subset of 9 primers belonged to candidate primer/probe sets that failed to produce a probe-detectable amplification product in assay screening experiments.

[0167] A number of two-dimensional matrix plots (FIGS. 17A-17H) were generated using different combinations of design parameters for the X- and Y-axis, respectively, with the intent to identify parameter combinations at which the data points of failing assay primers would cluster separately from the data points of functional assay primers. As demonstrated by the plots at FIGS. 17B-17H, no combination of standard design parameters used in prior art for primer design (T_{M}, ΔG, % GC, sequence length in bases) produced a discernable separation of functional from non-functional primers in a two dimensional plot matrix. The data points of both primer populations widely overlap in these plots, as was expected due to the wide overlapping ranges of standard parameter values among functional and non-functional oligonucleotide primers.

[0168] Surprisingly, only the novel relative thermodynamic parameter of ΔΔG as defined by the inventors of this application produced a matrix in which the data points of functional and non-functional primers clustered separately in correlation with the experimental outcome of primer set screening tests. The plot at FIG. 17A shows a matrix in which the X-axis provides the scale for plotting the ΔΔG values of the self-complementary first primer region and the Y-axis provides the scale for plotting the ΔΔG values of the target-complementary second primer region, respectively. All failing assay primers possessed ΔΔG values for either the second region/target duplex (in most cases), or the first region self-complementary duplex (in 1 case) that were less than −15 kcal/mol. Therefore, the ΔΔG value of about −15 kcal/mol turned to be the experimental threshold for this oligonucleotide primer data set that separates functional from non-functional primers.

[0169] ΔΔG is a relative parameter that measures the difference, i.e. relative advantage, of thermodynamic favorability of formation of the desired oligonucleotide structure (specific primer/target hybrid and first region self dimer) over the favorability of the formation of a multitude of predicted alternative structures at room temperature and atmospheric pressure in a dynamic equilibrium. Surprisingly, this ΔG advantage (ΔΔG) turned out to be the predictive parameter for assay success when candidate primer oligonucleotides are designed in silico.

[0170] The use of calculated ΔΔG values as a ranking score and predictor for functional isothermal assays was reduced to praxis in the following examples describing the design and test of isothermal DNAble® assays for the detection of the soy lectin gene and the Salmonella enterica invA gene. For the very first time, the screening of candidate primers and probes was performed exclusively in silico using calculated ΔΔG values. In each case, only a single primer/probe set was selected and tested experimentally. Two functional assays were established at first trial without time-consuming and costly screening of a multitude of candidate primer/probe sets.

### Other Embodiments

[0171] From the foregoing description, it will be apparent that variations and modifications may be made to the invention described herein to adopt it to various usages and conditions. Such embodiments are also within the scope of the following claims.

[0172] The recitation of a listing of elements in any definition of a variable herein includes definitions of that variable as any single element or combination (or subcombination) of listed elements. The recitation of an embodiment herein includes that embodiment as any single embodiment or in combination with any other embodiments or portions thereof.

[0173] This application may be related to International Patent Application No. PCT/US2013/035750, filed Apr. 9, 2013, which claims priority to and benefit of U.S. Provisional Application No. 61/621,975, filed Apr. 9, 2012, the entire contents of which are incorporated herein by reference.

[0174] This application may be related to International Patent Application No. PCT/US2011/047049, filed Aug. 9, 2011, which claims priority to and benefit of U.S. Provisional Application No. 61/373,695, filed Aug. 13, 2010, the entire contents of which are incorporated herein by reference.

[0175] All patents and publications mentioned in this specification are herein incorporated by reference to the same extent as if each independent patent and publication was specifically and individually indicated to be incorporated by reference.

1. An isolated primer oligonucleotide comprising from 5′ to 3′,
i) a first region comprising a self-complementary sequence comprising from 5′ to 3′ the reverse complement of a nicking enzyme recognition sequence, a palindromic sequence, and said nicking enzyme recognition sequence, and
ii) a second region at least 16 nucleotides long that specifically binds to a complementary region on a target nucleic acid molecule to form a double-stranded hybrid having a ΔG that is at least 15 kcal/mol lower than the ΔG of any alternate structure comprising the second region, wherein the second region comprises at the 3′ end one or more 2′ modified nucleotides.

2. The isolated primer oligonucleotide of claim 1, wherein said palindromic sequence in the first region is 2, 4, or 6 nucleotides long.

3. The isolated primer oligonucleotide of claim 1, wherein the first region is 12, 13, 14, 15, 16, 17, 18, 19, 20, 21, 22, 23, or 24 nucleotides in length.

4. (canceled)

5. (canceled)

6. The isolated primer oligonucleotide of claim 1, wherein the alternate structure is one or more of a partially double-stranded hybrid that the second region can form with itself, with a partial sequence of the first region, with other oligonucleotides, primers, or probes in an amplification reaction, or with partially complementary nucleic acid sequences outside of the target sequence region.

7. The isolated primer oligonucleotide of claim 1, in the form of a homodimer formed by hybridization of the self-complementary first region sequences of two primer oligonucleotide molecules.

8. (canceled)

9. The isolated primer oligonucleotide of claim 1, wherein the one or more 2′ modified nucleotides has a 2′ modification selected from the group consisting of 2′-O-methyl, 2′-methoxyethoxy, 2′-fluoro, 2′-hydroxyl, 2′-alkyl, 2′-allyl, 2′-O-[2-(methylamino)-2-oxoethyl], 4′-thio, 4′-CH₂—O-2′-bridge, 4′-(CH₂)₂—O-2′-bridge, 2′-LNA, and 2′-O—(N-methylcarbamate) or those comprising base analogs.

10. The isolated primer oligonucleotide of claim 1, wherein the one or more 2′ modified nucleotides are positioned at the 3′ terminus of the second region.

11. The isolated primer oligonucleotide of claim 9, wherein 2, 3, 4, 5, or 6 more 2′ modified nucleotides are contiguous.

12. (canceled)

13. The isolated primer oligonucleotide of claim 1, wherein the nicking enzyme is one or more of Nt.BspD6I and Nt.BstNBI.

14. (canceled)

15. The isolated primer oligonucleotide of claim 1, wherein the recognition sequence of the nicking agent is positioned to cleave the phosphodiester bond between the first and second regions.

16. The isolated primer oligonucleotide of claim 1, having a first region comprising a nucleic acid sequence set forth below:
5′-GACTCN₁N_{1′}GAGTC-3′;
5′-GACTCN₁N_{1′}GAGTCN-3′;
5′-N₂GACTCN₁N_{1′}GAGTCN_{2′}-3′;
5′-N₂GACTCN₁N_{1′}GAGTCN_{2′}N-3′;
5′-N₃N₂GACTCN₁N_{1′}GAGTCN_{2′}N_{3′}-3′;
5′-N₃N₂GACTCN₁N_{1′}GAGTCN_{2′}N_{3′}N-3′;
5′-N₄N₃N₂GACTCN₁N_{1′}GAGTCN_{2′}N_{3′}N_{4′}-3′;
5′-N₄N₃N₂GACTCN₁N_{1′}GAGTCN_{2′}N_{3′}N_{4′}N-3′;
5′-N₅N₄N₃N₂GACTCN₁N_{1′}GAGTCN_{2′}N_{3′}N_{4′}N_{5′}-3′;
5′-GACTCN₂N₁N_{1′}N_{2′}GAGTC-3′;
5′-GACTCN₂N₁N_{1′}N_{2′}GAGTCN-3′;
5′-N₃GACTCN₂N₁N_{1′}N_{2′}GAGTCN_{3′}-3′;
5′-N₃GACTCN₂N₁N_{1′}N_{2′}GAGTCN_{3′}N-3′;
5′-N₄N₃GACTCN₂N₁N_{1′}N_{2′}GAGTCN_{3′}N_{4′}-3′;
5′-N₄N₃GACTCN₂N₁N_{1′}N_{2′}GAGTCN_{3′}N_{4′}N-3′;
5′-N₅N₄N₃GACTCN₂N₁N_{1′}N_{2′}GAGTCN_{3′}N_{4′}N_{5′}-3′;
5′-N₅N₄N₃GACTCN₂N₁N_{1′}N_{2′}GAGTCN_{3′}N_{4′}N_{5′}N-3′;
and
5′-N₆N₅N₄N₃GACTCN₂N₁N_{1′}N_{2′}GAGTCN_{3′}N_{4′}N_{5′}N_{6′}-3′,
5′-GACTCN₃N₂N₁N_{1′}N_{2′}N_{3′}GAGTC-3′;
5′-GACTCN₃N₂N₁N_{1′}N_{2′}N_{3′}GAGTCN-3′;
5′-GACTCN₃N₂N₁N_{1′}N_{2′}N_{3′}GAGTCNN-3′;
5′-GACTCN₃N₂N₁N_{1′}N_{2′}N_{3′}GAGTCNNN-3′;
5′-GACTCN₃N₂N₁N_{1′}N_{2′}N_{3′}GAGTCNNNN-3′;
5′-N₄GACTCN₃N₂N₁N_{1′}N_{2′}N_{3′}GAGTCN_{4′}-3′;
5′-N₄GACTCN₃N₂N₁N_{1′}N_{2′}N_{3′}GAGTCN_{4′}N-3′;
5′-N₄GACTCN₃N₂N₁N_{1′}N_{2′}N_{3′}GAGTCN_{4′}NN-3′;
5′-N₄GACTCN₃N₂N₁N_{1′}N_{2′}N_{3′}GAGTCN_{4′}NNN-3′;
5′-N₅N₄GACTCN₃N₂N₁N_{1′}N_{2′}N_{3′}GAGTCN_{4′}N_{5′}-3′;
5′-N₅N₄GACTCN₃N₂N₁N_{1′}N_{2′}N_{3′}GAGTCN_{4′}N_{5′}N-3′;
5′-N₆N₅N₄GACTCN₃N₂N₁N_{1′}N_{2′}N_{3′}GAGTCN_{4′}N_{5′}N_{6′}-3′;
5′-N₆N₅N₄GACTCN₃N₂N₁N_{1′}N_{2′}N_{3′}GAGTCN_{4′}N_{5′}N_{6′}N-3′;
and
5′-N₇N₆N₅N₄GACTCN₃N₂N₁N_{1′}N_{2′}N_{3′}GAGTCN_{4′}N_{5′}N_{6′}N_{7′}-3′,
where “N” is any nucleotide (e.g., having an adenine (A), thymine (T), cytosine (C), or guanine (G) nucleobase), and N₁ is complementary to N_{1′}, N₂ to N_{2′}, N₃ to N_{3′}, N₄ to N_{4′}, N₅ to N_{5′}, N₆ to N_{6′}, and N₇ to N_{7′}.

17-37. (canceled)

38. A method of amplifying a specific product in a nicking and extension amplification reaction, the method comprising:
(a) contacting a target nucleic acid molecule under substantially isothermal conditions with a polymerase, two or more primers, each of which specifically binds to a complementary sequence on the target nucleic acid molecule, a nicking enzyme, and a detectable polynucleotide probe, wherein at least one primer comprises from 5′ to 3′,
i) a first region comprising a self-complementary sequence comprising from 5′ to 3′ the reverse complement of a nicking enzyme recognition sequence, a palindromic sequence, and said nicking enzyme recognition sequence, and
ii) a second region at least 16 nucleotides long that specifically binds to a complementary region on a target nucleic acid molecule to form a double-stranded hybrid having a ΔG that is at least 15 kcal/mol lower than the ΔG of any alternate structure comprising the second region, wherein the second region comprises at the 3′ end one or more 2′ modified nucleotides; and
(b) generating amplicons comprising at least a portion of said target nucleic acid molecule.

39. A method of claim 38, further comprising:
(c) detecting a signal specific for oligonucleotide probe hybridization to the target nucleic acid molecule or amplicon thereof, wherein the signal indicates the presence of the target nucleic acid molecule present in the sample or an amplicon thereof.

40. The method of claim 39, wherein the oligonucleotide probe comprises:
i) an oligonucleotide;
ii) a fluorescent reporter; and
iii) a quenching molecule capable of absorbing the excitation energy from the fluorescent reporter;
wherein the fluorescent reporter and quenching molecule are covalently attached to opposite 5′ and 3′ ends of the oligonucleotide,
wherein the oligonucleotide comprises a first region having a nucleic acid sequence that is substantially complementary to a target nucleic acid sequence and
a) a second region 5′ upstream of the first region, and
b) a third region 3′ downstream of the first region that has a nucleic acid sequence complementary to the second region,
wherein the oligonucleotide is capable of forming a stem-loop hairpin structure by hybridization of the second and third regions when the oligonucleotide is not bound to the target nucleic acid molecule.

41. The method of claim 38, wherein the polymerase is a Geobacillus spp. or Bacillus stearothermophilus DNA polymerase I, or active fragments and derivatives thereof.

42-49. (canceled)

50. The method of claim 38, wherein the one or more 2′ modified nucleotides has a 2′ modification selected from the group consisting of 2′-O-methyl, 2′-methoxyethoxy, 2′-fluoro, 2′-hydroxyl, 2′-alkyl, 2′-allyl, 2′-O-[2-(methylamino)-2-oxoethyl], 4′-thio, 4′-CH₂—O-2′-bridge, 4′-(CH₂)₂—O-2′-bridge, 2′-LNA, and 2′-O—(N-methylcarbamate) or those comprising base analogs.

51. The method of claim 38, wherein the one or more 2′ modified nucleotides are positioned at the 3′ terminus of the second region.

52. The method of claim 38, wherein 2, 4, 5, 6 more 2′ modified nucleotides are contiguous.

53-58. (canceled)

59. A kit for amplifying a target sequence in a nicking amplification reaction, the kit comprising one or more primer oligonucleotides comprising from 5′ to 3′,
i) a first region comprising a self-complementary sequence comprising from 5′ to 3′ the reverse complement of a nicking enzyme recognition sequence, a palindromic sequence, and said nicking enzyme recognition sequence, and
ii) a second region at least 16 nucleotides long that specifically binds to a complementary region on a target nucleic acid molecule to form a double-stranded hybrid having a ΔG that is at least 15 kcal/mol lower than the ΔG of any alternate structure comprising the second region, wherein the second region comprises at the 3′ end one or more 2′ modified nucleotides;
and directions for use of the primer oligonucleotides.

60. The kit of claim 59, further comprising an oligonucleotide probe comprising:
i) an oligonucleotide;
ii) a fluorescent reporter; and
iii) a quenching molecule capable of absorbing the excitation energy from the fluorescent reporter;
wherein the fluorescent reporter and quenching molecule are covalently attached to opposite 5′ and 3′ ends of the oligonucleotide,
wherein the oligonucleotide comprises a first region having a nucleic acid sequence that is substantially complementary to a target nucleic acid sequence and
a) a second region 5′ upstream of the first region, and
b) a third region 3′ downstream of the first region that has a nucleic acid sequence complementary to the second region,
wherein the oligonucleotide is capable of forming a stem-loop hairpin structure by hybridization of the second and third regions when the oligonucleotide is not bound to the target nucleic acid molecule.

61. (canceled)

The application's sequence listing, which the Patent Office published only in electronic form, follows.

SEQUENCE LISTING (15240 sequences)

SEQ ID NO: 1 - DNA, 24 bp, Artificial sequence
  Primer
  misc_feature (1)..(4): n is a, c, g, or t
  misc_feature (21)..(24): n is a, c, g, or t
nnnngactccgatcggagtcnnnn

SEQ ID NO: 2 - DNA, 24 bp, Artificial sequence
  Primer
ggcggactccgatcggagtccgcc

SEQ ID NO: 3 - DNA, 24 bp, Artificial sequence
  Primer
agcggactccgatcggagtccgct

SEQ ID NO: 4 - DNA, 24 bp, Artificial sequence
  Primer
gacggactccgatcggagtccgtc

SEQ ID NO: 5 - DNA, 24 bp, Artificial sequence
  Primer
ggaggactccgatcggagtcctcc

SEQ ID NO: 6 - DNA, 24 bp, Artificial sequence
  Primer
ggcagactccgatcggagtctgcc

SEQ ID NO: 7 - DNA, 24 bp, Artificial sequence
  Primer
tgcggactccgatcggagtccgca

SEQ ID NO: 8 - DNA, 24 bp, Artificial sequence
  Primer
gtcggactccgatcggagtccgac

SEQ ID NO: 9 - DNA, 24 bp, Artificial sequence
  Primer
ggtggactccgatcggagtccacc

SEQ ID NO: 10 - DNA, 24 bp, Artificial sequence
  Primer
ggctgactccgatcggagtcagcc

SEQ ID NO: 11 - DNA, 24 bp, Artificial sequence
  Primer
gcccgactccgatcggagtcgggc

SEQ ID NO: 12 - DNA, 24 bp, Artificial sequence
  Primer
acccgactccgatcggagtcgggt

SEQ ID NO: 13 - DNA, 24 bp, Artificial sequence
  Primer
gaccgactccgatcggagtcggtc

SEQ ID NO: 14 - DNA, 24 bp, Artificial sequence
  Primer
gcacgactccgatcggagtcgtgc

SEQ ID NO: 15 - DNA, 24 bp, Artificial sequence
  Primer
gccagactccgatcggagtctggc

SEQ ID NO: 16 - DNA, 24 bp, Artificial sequence
  Primer
tcccgactccgatcggagtcggga

SEQ ID NO: 17 - DNA, 24 bp, Artificial sequence
  Primer
gtccgactccgatcggagtcggac

SEQ ID NO: 18 - DNA, 24 bp, Artificial sequence
  Primer
gcctgactccgatcggagtcaggc

SEQ ID NO: 19 - DNA, 24 bp, Artificial sequence
  Primer
gggcgactccgatcggagtcgccc

SEQ ID NO: 20 - DNA, 24 bp, Artificial sequence
  Primer
aggcgactccgatcggagtcgcct

SEQ ID NO: 21 - DNA, 24 bp, Artificial sequence
  Primer
gagcgactccgatcggagtcgctc

SEQ ID NO: 22 - DNA, 24 bp, Artificial sequence
  Primer
ggacgactccgatcggagtcgtcc

SEQ ID NO: 23 - DNA, 24 bp, Artificial sequence
  Primer
gggagactccgatcggagtctccc

SEQ ID NO: 24 - DNA, 24 bp, Artificial sequence
  Primer
tggcgactccgatcggagtcgcca

SEQ ID NO: 25 - DNA, 24 bp, Artificial sequence
  Primer
gtgcgactccgatcggagtcgcac

SEQ ID NO: 26 - DNA, 24 bp, Artificial sequence
  Primer
gggtgactccgatcggagtcaccc

SEQ ID NO: 27 - DNA, 24 bp, Artificial sequence
  Primer
acgggactccgatcggagtcccgt

SEQ ID NO: 28 - DNA, 24 bp, Artificial sequence
  Primer
cagggactccgatcggagtccctg

SEQ ID NO: 29 - DNA, 24 bp, Artificial sequence
  Primer
ccaggactccgatcggagtcctgg

SEQ ID NO: 30 - DNA, 24 bp, Artificial sequence
  Primer
ccgagactccgatcggagtctcgg

SEQ ID NO: 31 - DNA, 24 bp, Artificial sequence
  Primer
tcgggactccgatcggagtcccga

SEQ ID NO: 32 - DNA, 24 bp, Artificial sequence
  Primer
ctgggactccgatcggagtcccag

SEQ ID NO: 33 - DNA, 24 bp, Artificial sequence
  Primer
cctggactccgatcggagtccagg

SEQ ID NO: 34 - DNA, 24 bp, Artificial sequence
  Primer
ccgtgactccgatcggagtcacgg

SEQ ID NO: 35 - DNA, 24 bp, Artificial sequence
  Primer
cggcgactccgatcggagtcgccg

SEQ ID NO: 36 - DNA, 24 bp, Artificial sequence
  Primer
cagcgactccgatcggagtcgctg

SEQ ID NO: 37 - DNA, 24 bp, Artificial sequence
  Primer
cgacgactccgatcggagtcgtcg

SEQ ID NO: 38 - DNA, 24 bp, Artificial sequence
  Primer
cggagactccgatcggagtctccg

SEQ ID NO: 39 - DNA, 24 bp, Artificial sequence
  Primer
ctgcgactccgatcggagtcgcag

SEQ ID NO: 40 - DNA, 24 bp, Artificial sequence
  Primer
cggtgactccgatcggagtcaccg

SEQ ID NO: 41 - DNA, 24 bp, Artificial sequence
  Primer
cacggactccgatcggagtccgtg

SEQ ID NO: 42 - DNA, 24 bp, Artificial sequence
  Primer
cccagactccgatcggagtctggg

SEQ ID NO: 43 - DNA, 24 bp, Artificial sequence
  Primer
ctcggactccgatcggagtccgag

SEQ ID NO: 44 - DNA, 24 bp, Artificial sequence
  Primer
ccctgactccgatcggagtcaggg

SEQ ID NO: 45 - DNA, 24 bp, Artificial sequence
  Primer
ccacgactccgatcggagtcgtgg

SEQ ID NO: 46 - DNA, 24 bp, Artificial sequence
  Primer
agccgactccgatcggagtcggct

SEQ ID NO: 47 - DNA, 24 bp, Artificial sequence
  Primer
tgccgactccgatcggagtcggca

SEQ ID NO: 48 - DNA, 24 bp, Artificial sequence
  Primer
gcgagactccgatcggagtctcgc

SEQ ID NO: 49 - DNA, 24 bp, Artificial sequence
  Primer
gcgtgactccgatcggagtcacgc

SEQ ID NO: 50 - DNA, 24 bp, Artificial sequence
  Primer
gcaggactccgatcggagtcctgc

SEQ ID NO: 51 - DNA, 24 bp, Artificial sequence
  Primer
gctggactccgatcggagtccagc

SEQ ID NO: 52 - DNA, 24 bp, Artificial sequence
  Primer
cgaggactccgatcggagtcctcg

SEQ ID NO: 53 - DNA, 24 bp, Artificial sequence
  Primer
cgtggactccgatcggagtccacg

SEQ ID NO: 54 - DNA, 24 bp, Artificial sequence
  Primer
caccgactccgatcggagtcggtg

SEQ ID NO: 55 - DNA, 24 bp, Artificial sequence
  Primer
ctccgactccgatcggagtcggag

SEQ ID NO: 56 - DNA, 24 bp, Artificial sequence
  Primer
gcgggactccgatcggagtcccgc

SEQ ID NO: 57 - DNA, 24 bp, Artificial sequence
  Primer
gagggactccgatcggagtccctc

SEQ ID NO: 58 - DNA, 24 bp, Artificial sequence
  Primer
gtgggactccgatcggagtcccac

SEQ ID NO: 59 - DNA, 24 bp, Artificial sequence
  Primer
  misc_feature (1)..(4): n is a, c, g, or t
  misc_feature (21)..(24): n is a, c, g, or t
nnnngactccgtacggagtcnnnn

SEQ ID NO: 60 - DNA, 24 bp, Artificial sequence
  Primer
ggcggactccgtacggagtccgcc

SEQ ID NO: 61 - DNA, 24 bp, Artificial sequence
  Primer
agcggactccgtacggagtccgct

SEQ ID NO: 62 - DNA, 24 bp, Artificial sequence
  Primer
gacggactccgtacggagtccgtc

SEQ ID NO: 63 - DNA, 24 bp, Artificial sequence
  Primer
ggaggactccgtacggagtcctcc

SEQ ID NO: 64 - DNA, 24 bp, Artificial sequence
  Primer
ggcagactccgtacggagtctgcc

SEQ ID NO: 65 - DNA, 24 bp, Artificial sequence
  Primer
tgcggactccgtacggagtccgca

SEQ ID NO: 66 - DNA, 24 bp, Artificial sequence
  Primer
gtcggactccgtacggagtccgac

SEQ ID NO: 67 - DNA, 24 bp, Artificial sequence
  Primer
ggtggactccgtacggagtccacc

SEQ ID NO: 68 - DNA, 24 bp, Artificial sequence
  Primer
ggctgactccgtacggagtcagcc

SEQ ID NO: 69 - DNA, 24 bp, Artificial sequence
  Primer
gcccgactccgtacggagtcgggc

SEQ ID NO: 70 - DNA, 24 bp, Artificial sequence
  Primer
acccgactccgtacggagtcgggt

SEQ ID NO: 71 - DNA, 24 bp, Artificial sequence
  Primer
gaccgactccgtacggagtcggtc

SEQ ID NO: 72 - DNA, 24 bp, Artificial sequence
  Primer
gcacgactccgtacggagtcgtgc

SEQ ID NO: 73 - DNA, 24 bp, Artificial sequence
  Primer
gccagactccgtacggagtctggc

SEQ ID NO: 74 - DNA, 24 bp, Artificial sequence
  Primer
tcccgactccgtacggagtcggga

SEQ ID NO: 75 - DNA, 24 bp, Artificial sequence
  Primer
gtccgactccgtacggagtcggac

SEQ ID NO: 76 - DNA, 24 bp, Artificial sequence
  Primer
gcctgactccgtacggagtcaggc

SEQ ID NO: 77 - DNA, 24 bp, Artificial sequence
  Primer
gggcgactccgtacggagtcgccc

SEQ ID NO: 78 - DNA, 24 bp, Artificial sequence
  Primer
aggcgactccgtacggagtcgcct

SEQ ID NO: 79 - DNA, 24 bp, Artificial sequence
  Primer
gagcgactccgtacggagtcgctc

SEQ ID NO: 80 - DNA, 24 bp, Artificial sequence
  Primer
ggacgactccgtacggagtcgtcc

SEQ ID NO: 81 - DNA, 24 bp, Artificial sequence
  Primer
gggagactccgtacggagtctccc

SEQ ID NO: 82 - DNA, 24 bp, Artificial sequence
  Primer
tggcgactccgtacggagtcgcca

SEQ ID NO: 83 - DNA, 24 bp, Artificial sequence
  Primer
gtgcgactccgtacggagtcgcac

SEQ ID NO: 84 - DNA, 24 bp, Artificial sequence
  Primer
gggtgactccgtacggagtcaccc

SEQ ID NO: 85 - DNA, 24 bp, Artificial sequence
  Primer
acgggactccgtacggagtcccgt

SEQ ID NO: 86 - DNA, 24 bp, Artificial sequence
  Primer
cagggactccgtacggagtccctg

SEQ ID NO: 87 - DNA, 24 bp, Artificial sequence
  Primer
ccaggactccgtacggagtcctgg

SEQ ID NO: 88 - DNA, 24 bp, Artificial sequence
  Primer
ccgagactccgtacggagtctcgg

SEQ ID NO: 89 - DNA, 24 bp, Artificial sequence
  Primer
tcgggactccgtacggagtcccga

SEQ ID NO: 90 - DNA, 24 bp, Artificial sequence
  Primer
ctgggactccgtacggagtcccag

SEQ ID NO: 91 - DNA, 24 bp, Artificial sequence
  Primer
cctggactccgtacggagtccagg

SEQ ID NO: 92 - DNA, 24 bp, Artificial sequence
  Primer
ccgtgactccgtacggagtcacgg

SEQ ID NO: 93 - DNA, 24 bp, Artificial sequence
  Primer
cggcgactccgtacggagtcgccg

SEQ ID NO: 94 - DNA, 24 bp, Artificial sequence
  Primer
cagcgactccgtacggagtcgctg

SEQ ID NO: 95 - DNA, 24 bp, Artificial sequence
  Primer
cgacgactccgtacggagtcgtcg

SEQ ID NO: 96 - DNA, 24 bp, Artificial sequence
  Primer
cggagactccgtacggagtctccg

SEQ ID NO: 97 - DNA, 24 bp, Artificial sequence
  Primer
ctgcgactccgtacggagtcgcag

SEQ ID NO: 98 - DNA, 24 bp, Artificial sequence
  Primer
cggtgactccgtacggagtcaccg

SEQ ID NO: 99 - DNA, 24 bp, Artificial sequence
  Primer
cacggactccgtacggagtccgtg

SEQ ID NO: 100 - DNA, 24 bp, Artificial sequence
  Primer
cccagactccgtacggagtctggg

SEQ ID NO: 101 - DNA, 24 bp, Artificial sequence
  Primer
ctcggactccgtacggagtccgag

SEQ ID NO: 102 - DNA, 24 bp, Artificial sequence
  Primer
ccctgactccgtacggagtcaggg

SEQ ID NO: 103 - DNA, 24 bp, Artificial sequence
  Primer
ccacgactccgtacggagtcgtgg

SEQ ID NO: 104 - DNA, 24 bp, Artificial sequence
  Primer
agccgactccgtacggagtcggct

SEQ ID NO: 105 - DNA, 24 bp, Artificial sequence
  Primer
tgccgactccgtacggagtcggca

SEQ ID NO: 106 - DNA, 24 bp, Artificial sequence
  Primer
gcgagactccgtacggagtctcgc

SEQ ID NO: 107 - DNA, 24 bp, Artificial sequence
  Primer
gcgtgactccgtacggagtcacgc

SEQ ID NO: 108 - DNA, 24 bp, Artificial sequence
  Primer
gcaggactccgtacggagtcctgc

SEQ ID NO: 109 - DNA, 24 bp, Artificial sequence
  Primer
gctggactccgtacggagtccagc

SEQ ID NO: 110 - DNA, 24 bp, Artificial sequence
  Primer
cgaggactccgtacggagtcctcg

SEQ ID NO: 111 - DNA, 24 bp, Artificial sequence
  Primer
cgtggactccgtacggagtccacg

SEQ ID NO: 112 - DNA, 24 bp, Artificial sequence
  Primer
caccgactccgtacggagtcggtg

SEQ ID NO: 113 - DNA, 24 bp, Artificial sequence
  Primer
ctccgactccgtacggagtcggag

SEQ ID NO: 114 - DNA, 24 bp, Artificial sequence
  Primer
gcgggactccgtacggagtcccgc

SEQ ID NO: 115 - DNA, 24 bp, Artificial sequence
  Primer
gagggactccgtacggagtccctc

SEQ ID NO: 116 - DNA, 24 bp, Artificial sequence
  Primer
gtgggactccgtacggagtcccac

SEQ ID NO: 117 - DNA, 24 bp, Artificial sequence
  Primer
  misc_feature (1)..(4): n is a, c, g, or t
  misc_feature (21)..(24): n is a, c, g, or t
nnnngactccggccggagtcnnnn

SEQ ID NO: 118 - DNA, 24 bp, Artificial sequence
  Primer
ggcggactccggccggagtccgcc

SEQ ID NO: 119 - DNA, 24 bp, Artificial sequence
  Primer
agcggactccggccggagtccgct

SEQ ID NO: 120 - DNA, 24 bp, Artificial sequence
  Primer
gacggactccggccggagtccgtc

SEQ ID NO: 121 - DNA, 24 bp, Artificial sequence
  Primer
ggaggactccggccggagtcctcc

SEQ ID NO: 122 - DNA, 24 bp, Artificial sequence
  Primer
ggcagactccggccggagtctgcc

SEQ ID NO: 123 - DNA, 24 bp, Artificial sequence
  Primer
tgcggactccggccggagtccgca

SEQ ID NO: 124 - DNA, 24 bp, Artificial sequence
  Primer
gtcggactccggccggagtccgac

SEQ ID NO: 125 - DNA, 24 bp, Artificial sequence
  Primer
ggtggactccggccggagtccacc

SEQ ID NO: 126 - DNA, 24 bp, Artificial sequence
  Primer
ggctgactccggccggagtcagcc

SEQ ID NO: 127 - DNA, 24 bp, Artificial sequence
  Primer
gcccgactccggccggagtcgggc

SEQ ID NO: 128 - DNA, 24 bp, Artificial sequence
  Primer
acccgactccggccggagtcgggt

SEQ ID NO: 129 - DNA, 24 bp, Artificial sequence
  Primer
gaccgactccggccggagtcggtc

SEQ ID NO: 130 - DNA, 24 bp, Artificial sequence
  Primer
gcacgactccggccggagtcgtgc

SEQ ID NO: 131 - DNA, 24 bp, Artificial sequence
  Primer
gccagactccggccggagtctggc

SEQ ID NO: 132 - DNA, 24 bp, Artificial sequence
  Primer
tcccgactccggccggagtcggga

SEQ ID NO: 133 - DNA, 24 bp, Artificial sequence
  Primer
gtccgactccggccggagtcggac

SEQ ID NO: 134 - DNA, 24 bp, Artificial sequence
  Primer
gcctgactccggccggagtcaggc

SEQ ID NO: 135 - DNA, 24 bp, Artificial sequence
  Primer
gggcgactccggccggagtcgccc

SEQ ID NO: 136 - DNA, 24 bp, Artificial sequence
  Primer
aggcgactccggccggagtcgcct

SEQ ID NO: 137 - DNA, 24 bp, Artificial sequence
  Primer
gagcgactccggccggagtcgctc

SEQ ID NO: 138 - DNA, 24 bp, Artificial sequence
  Primer
ggacgactccggccggagtcgtcc

SEQ ID NO: 139 - DNA, 24 bp, Artificial sequence
  Primer
gggagactccggccggagtctccc

SEQ ID NO: 140 - DNA, 24 bp, Artificial sequence
  Primer
tggcgactccggccggagtcgcca

SEQ ID NO: 141 - DNA, 24 bp, Artificial sequence
  Primer
gtgcgactccggccggagtcgcac

SEQ ID NO: 142 - DNA, 24 bp, Artificial sequence
  Primer
gggtgactccggccggagtcaccc

SEQ ID NO: 143 - DNA, 24 bp, Artificial sequence
  Primer
acgggactccggccggagtcccgt

SEQ ID NO: 144 - DNA, 24 bp, Artificial sequence
  Primer
cagggactccggccggagtccctg

SEQ ID NO: 145 - DNA, 24 bp, Artificial sequence
  Primer
ccaggactccggccggagtcctgg

SEQ ID NO: 146 - DNA, 24 bp, Artificial sequence
  Primer
ccgagactccggccggagtctcgg

SEQ ID NO: 147 - DNA, 24 bp, Artificial sequence
  Primer
tcgggactccggccggagtcccga

SEQ ID NO: 148 - DNA, 24 bp, Artificial sequence
  Primer
ctgggactccggccggagtcccag

SEQ ID NO: 149 - DNA, 24 bp, Artificial sequence
  Primer
cctggactccggccggagtccagg

SEQ ID NO: 150 - DNA, 24 bp, Artificial sequence
  Primer
ccgtgactccggccggagtcacgg

SEQ ID NO: 151 - DNA, 24 bp, Artificial sequence
  Primer
cggcgactccggccggagtcgccg

SEQ ID NO: 152 - DNA, 24 bp, Artificial sequence
  Primer
cagcgactccggccggagtcgctg

SEQ ID NO: 153 - DNA, 24 bp, Artificial sequence
  Primer
cgacgactccggccggagtcgtcg

SEQ ID NO: 154 - DNA, 24 bp, Artificial sequence
  Primer
cggagactccggccggagtctccg

SEQ ID NO: 155 - DNA, 24 bp, Artificial sequence
  Primer
ctgcgactccggccggagtcgcag

SEQ ID NO: 156 - DNA, 24 bp, Artificial sequence
  Primer
cggtgactccggccggagtcaccg

SEQ ID NO: 157 - DNA, 24 bp, Artificial sequence
  Primer
cacggactccggccggagtccgtg

SEQ ID NO: 158 - DNA, 24 bp, Artificial sequence
  Primer
cccagactccggccggagtctggg

SEQ ID NO: 159 - DNA, 24 bp, Artificial sequence
  Primer
ctcggactccggccggagtccgag

SEQ ID NO: 160 - DNA, 24 bp, Artificial sequence
  Primer
ccctgactccggccggagtcaggg

SEQ ID NO: 161 - DNA, 24 bp, Artificial sequence
  Primer
ccacgactccggccggagtcgtgg

SEQ ID NO: 162 - DNA, 24 bp, Artificial sequence
  Primer
agccgactccggccggagtcggct

SEQ ID NO: 163 - DNA, 24 bp, Artificial sequence
  Primer
tgccgactccggccggagtcggca

SEQ ID NO: 164 - DNA, 24 bp, Artificial sequence
  Primer
gcgagactccggccggagtctcgc

SEQ ID NO: 165 - DNA, 24 bp, Artificial sequence
  Primer
gcgtgactccggccggagtcacgc

SEQ ID NO: 166 - DNA, 24 bp, Artificial sequence
  Primer
gcaggactccggccggagtcctgc

SEQ ID NO: 167 - DNA, 24 bp, Artificial sequence
  Primer
gctggactccggccggagtccagc

SEQ ID NO: 168 - DNA, 24 bp, Artificial sequence
  Primer
cgaggactccggccggagtcctcg

SEQ ID NO: 169 - DNA, 24 bp, Artificial sequence
  Primer
cgtggactccggccggagtccacg

SEQ ID NO: 170 - DNA, 24 bp, Artificial sequence
  Primer
caccgactccggccggagtcggtg

SEQ ID NO: 171 - DNA, 24 bp, Artificial sequence
  Primer
ctccgactccggccggagtcggag

SEQ ID NO: 172 - DNA, 24 bp, Artificial sequence
  Primer
gcgggactccggccggagtcccgc

SEQ ID NO: 173 - DNA, 24 bp, Artificial sequence
  Primer
gagggactccggccggagtccctc

SEQ ID NO: 174 - DNA, 24 bp, Artificial sequence
  Primer
gtgggactccggccggagtcccac

SEQ ID NO: 175 - DNA, 24 bp, Artificial sequence
  Primer
  misc_feature (1)..(4): n is a, c, g, or t
  misc_feature (21)..(24): n is a, c, g, or t
nnnngactccgcgcggagtcnnnn

SEQ ID NO: 176 - DNA, 24 bp, Artificial sequence
  Primer
ggcggactccgcgcggagtccgcc

SEQ ID NO: 177 - DNA, 24 bp, Artificial sequence
  Primer
agcggactccgcgcggagtccgct

SEQ ID NO: 178 - DNA, 24 bp, Artificial sequence
  Primer
gacggactccgcgcggagtccgtc

SEQ ID NO: 179 - DNA, 24 bp, Artificial sequence
  Primer
ggaggactccgcgcggagtcctcc

SEQ ID NO: 180 - DNA, 24 bp, Artificial sequence
  Primer
ggcagactccgcgcggagtctgcc

SEQ ID NO: 181 - DNA, 24 bp, Artificial sequence
  Primer
tgcggactccgcgcggagtccgca

SEQ ID NO: 182 - DNA, 24 bp, Artificial sequence
  Primer
gtcggactccgcgcggagtccgac

SEQ ID NO: 183 - DNA, 24 bp, Artificial sequence
  Primer
ggtggactccgcgcggagtccacc

SEQ ID NO: 184 - DNA, 24 bp, Artificial sequence
  Primer
ggctgactccgcgcggagtcagcc

SEQ ID NO: 185 - DNA, 24 bp, Artificial sequence
  Primer
gcccgactccgcgcggagtcgggc

SEQ ID NO: 186 - DNA, 24 bp, Artificial sequence
  Primer
acccgactccgcgcggagtcgggt

SEQ ID NO: 187 - DNA, 24 bp, Artificial sequence
  Primer
gaccgactccgcgcggagtcggtc

SEQ ID NO: 188 - DNA, 24 bp, Artificial sequence
  Primer
gcacgactccgcgcggagtcgtgc

SEQ ID NO: 189 - DNA, 24 bp, Artificial sequence
  Primer
gccagactccgcgcggagtctggc

SEQ ID NO: 190 - DNA, 24 bp, Artificial sequence
  Primer
tcccgactccgcgcggagtcggga

SEQ ID NO: 191 - DNA, 24 bp, Artificial sequence
  Primer
gtccgactccgcgcggagtcggac

SEQ ID NO: 192 - DNA, 24 bp, Artificial sequence
  Primer
gcctgactccgcgcggagtcaggc

SEQ ID NO: 193 - DNA, 24 bp, Artificial sequence
  Primer
gggcgactccgcgcggagtcgccc

SEQ ID NO: 194 - DNA, 24 bp, Artificial sequence
  Primer
aggcgactccgcgcggagtcgcct

SEQ ID NO: 195 - DNA, 24 bp, Artificial sequence
  Primer
gagcgactccgcgcggagtcgctc

SEQ ID NO: 196 - DNA, 24 bp, Artificial sequence
  Primer
ggacgactccgcgcggagtcgtcc

SEQ ID NO: 197 - DNA, 24 bp, Artificial sequence
  Primer
gggagactccgcgcggagtctccc

SEQ ID NO: 198 - DNA, 24 bp, Artificial sequence
  Primer
tggcgactccgcgcggagtcgcca

SEQ ID NO: 199 - DNA, 24 bp, Artificial sequence
  Primer
gtgcgactccgcgcggagtcgcac

SEQ ID NO: 200 - DNA, 24 bp, Artificial sequence
  Primer
gggtgactccgcgcggagtcaccc

SEQ ID NO: 201 - DNA, 24 bp, Artificial sequence
  Primer
acgggactccgcgcggagtcccgt

SEQ ID NO: 202 - DNA, 24 bp, Artificial sequence
  Primer
cagggactccgcgcggagtccctg

SEQ ID NO: 203 - DNA, 24 bp, Artificial sequence
  Primer
ccaggactccgcgcggagtcctgg

SEQ ID NO: 204 - DNA, 24 bp, Artificial sequence
  Primer
ccgagactccgcgcggagtctcgg

SEQ ID NO: 205 - DNA, 24 bp, Artificial sequence
  Primer
tcgggactccgcgcggagtcccga

SEQ ID NO: 206 - DNA, 24 bp, Artificial sequence
  Primer
ctgggactccgcgcggagtcccag

SEQ ID NO: 207 - DNA, 24 bp, Artificial sequence
  Primer
cctggactccgcgcggagtccagg

SEQ ID NO: 208 - DNA, 24 bp, Artificial sequence
  Primer
ccgtgactccgcgcggagtcacgg

SEQ ID NO: 209 - DNA, 24 bp, Artificial sequence
  Primer
cggcgactccgcgcggagtcgccg

SEQ ID NO: 210 - DNA, 24 bp, Artificial sequence
  Primer
cagcgactccgcgcggagtcgctg

SEQ ID NO: 211 - DNA, 24 bp, Artificial sequence
  Primer
cgacgactccgcgcggagtcgtcg

SEQ ID NO: 212 - DNA, 24 bp, Artificial sequence
  Primer
cggagactccgcgcggagtctccg

SEQ ID NO: 213 - DNA, 24 bp, Artificial sequence
  Primer
ctgcgactccgcgcggagtcgcag

SEQ ID NO: 214 - DNA, 24 bp, Artificial sequence
  Primer
cggtgactccgcgcggagtcaccg

SEQ ID NO: 215 - DNA, 24 bp, Artificial sequence
  Primer
cacggactccgcgcggagtccgtg

SEQ ID NO: 216 - DNA, 24 bp, Artificial sequence
  Primer
cccagactccgcgcggagtctggg

SEQ ID NO: 217 - DNA, 24 bp, Artificial sequence
  Primer
ctcggactccgcgcggagtccgag

SEQ ID NO: 218 - DNA, 24 bp, Artificial sequence
  Primer
ccctgactccgcgcggagtcaggg

SEQ ID NO: 219 - DNA, 24 bp, Artificial sequence
  Primer
ccacgactccgcgcggagtcgtgg

SEQ ID NO: 220 - DNA, 24 bp, Artificial sequence
  Primer
agccgactccgcgcggagtcggct

SEQ ID NO: 221 - DNA, 24 bp, Artificial sequence
  Primer
tgccgactccgcgcggagtcggca

SEQ ID NO: 222 - DNA, 24 bp, Artificial sequence
  Primer
gcgagactccgcgcggagtctcgc

SEQ ID NO: 223 - DNA, 24 bp, Artificial sequence
  Primer
gcgtgactccgcgcggagtcacgc

SEQ ID NO: 224 - DNA, 24 bp, Artificial sequence
  Primer
gcaggactccgcgcggagtcctgc

SEQ ID NO: 225 - DNA, 24 bp, Artificial sequence
  Primer
gctggactccgcgcggagtccagc

SEQ ID NO: 226 - DNA, 24 bp, Artificial sequence
  Primer
cgaggactccgcgcggagtcctcg

SEQ ID NO: 227 - DNA, 24 bp, Artificial sequence
  Primer
cgtggactccgcgcggagtccacg

SEQ ID NO: 228 - DNA, 24 bp, Artificial sequence
  Primer
caccgactccgcgcggagtcggtg

SEQ ID NO: 229 - DNA, 24 bp, Artificial sequence
  Primer
ctccgactccgcgcggagtcggag

SEQ ID NO: 230 - DNA, 24 bp, Artificial sequence
  Primer
gcgggactccgcgcggagtcccgc

SEQ ID NO: 231 - DNA, 24 bp, Artificial sequence
  Primer
gagggactccgcgcggagtccctc

SEQ ID NO: 232 - DNA, 24 bp, Artificial sequence
  Primer
gtgggactccgcgcggagtcccac

SEQ ID NO: 233 - DNA, 24 bp, Artificial sequence
  Primer
  misc_feature (1)..(4): n is a, c, g, or t
  misc_feature (21)..(24): n is a, c, g, or t
nnnngactctgatcagagtcnnnn

SEQ ID NO: 234 - DNA, 24 bp, Artificial sequence
  Primer
ggcggactctgatcagagtccgcc

SEQ ID NO: 235 - DNA, 24 bp, Artificial sequence
  Primer
agcggactctgatcagagtccgct

SEQ ID NO: 236 - DNA, 24 bp, Artificial sequence
  Primer
gacggactctgatcagagtccgtc

SEQ ID NO: 237 - DNA, 24 bp, Artificial sequence
  Primer
ggaggactctgatcagagtcctcc

SEQ ID NO: 238 - DNA, 24 bp, Artificial sequence
  Primer
ggcagactctgatcagagtctgcc

SEQ ID NO: 239 - DNA, 24 bp, Artificial sequence
  Primer
tgcggactctgatcagagtccgca

SEQ ID NO: 240 - DNA, 24 bp, Artificial sequence
  Primer
gtcggactctgatcagagtccgac

SEQ ID NO: 241 - DNA, 24 bp, Artificial sequence
  Primer
ggtggactctgatcagagtccacc

SEQ ID NO: 242 - DNA, 24 bp, Artificial sequence
  Primer
ggctgactctgatcagagtcagcc

SEQ ID NO: 243 - DNA, 24 bp, Artificial sequence
  Primer
gcccgactctgatcagagtcgggc

SEQ ID NO: 244 - DNA, 24 bp, Artificial sequence
  Primer
acccgactctgatcagagtcgggt

SEQ ID NO: 245 - DNA, 24 bp, Artificial sequence
  Primer
gaccgactctgatcagagtcggtc

SEQ ID NO: 246 - DNA, 24 bp, Artificial sequence
  Primer
gcacgactctgatcagagtcgtgc

SEQ ID NO: 247 - DNA, 24 bp, Artificial sequence
  Primer
gccagactctgatcagagtctggc

SEQ ID NO: 248 - DNA, 24 bp, Artificial sequence
  Primer
tcccgactctgatcagagtcggga

SEQ ID NO: 249 - DNA, 24 bp, Artificial sequence
  Primer
gtccgactctgatcagagtcggac

SEQ ID NO: 250 - DNA, 24 bp, Artificial sequence
  Primer
gcctgactctgatcagagtcaggc

SEQ ID NO: 251 - DNA, 24 bp, Artificial sequence
  Primer
gggcgactctgatcagagtcgccc

SEQ ID NO: 252 - DNA, 24 bp, Artificial sequence
  Primer
aggcgactctgatcagagtcgcct

SEQ ID NO: 253 - DNA, 24 bp, Artificial sequence
  Primer
gagcgactctgatcagagtcgctc

SEQ ID NO: 254 - DNA, 24 bp, Artificial sequence
  Primer
ggacgactctgatcagagtcgtcc

SEQ ID NO: 255 - DNA, 24 bp, Artificial sequence
  Primer
gggagactctgatcagagtctccc

SEQ ID NO: 256 - DNA, 24 bp, Artificial sequence
  Primer
tggcgactctgatcagagtcgcca

SEQ ID NO: 257 - DNA, 24 bp, Artificial sequence
  Primer
gtgcgactctgatcagagtcgcac

SEQ ID NO: 258 - DNA, 24 bp, Artificial sequence
  Primer
gggtgactctgatcagagtcaccc

SEQ ID NO: 259 - DNA, 24 bp, Artificial sequence
  Primer
acgggactctgatcagagtcccgt

SEQ ID NO: 260 - DNA, 24 bp, Artificial sequence
  Primer
cagggactctgatcagagtccctg

SEQ ID NO: 261 - DNA, 24 bp, Artificial sequence
  Primer
ccaggactctgatcagagtcctgg

SEQ ID NO: 262 - DNA, 24 bp, Artificial sequence
  Primer
ccgagactctgatcagagtctcgg

SEQ ID NO: 263 - DNA, 24 bp, Artificial sequence
  Primer
tcgggactctgatcagagtcccga

SEQ ID NO: 264 - DNA, 24 bp, Artificial sequence
  Primer
ctgggactctgatcagagtcccag

SEQ ID NO: 265 - DNA, 24 bp, Artificial sequence
  Primer
cctggactctgatcagagtccagg

SEQ ID NO: 266 - DNA, 24 bp, Artificial sequence
  Primer
ccgtgactctgatcagagtcacgg

SEQ ID NO: 267 - DNA, 24 bp, Artificial sequence
  Primer
cggcgactctgatcagagtcgccg

SEQ ID NO: 268 - DNA, 24 bp, Artificial sequence
  Primer
cagcgactctgatcagagtcgctg

SEQ ID NO: 269 - DNA, 24 bp, Artificial sequence
  Primer
cgacgactctgatcagagtcgtcg

SEQ ID NO: 270 - DNA, 24 bp, Artificial sequence
  Primer
cggagactctgatcagagtctccg

SEQ ID NO: 271 - DNA, 24 bp, Artificial sequence
  Primer
ctgcgactctgatcagagtcgcag

SEQ ID NO: 272 - DNA, 24 bp, Artificial sequence
  Primer
cggtgactctgatcagagtcaccg

SEQ ID NO: 273 - DNA, 24 bp, Artificial sequence
  Primer
cacggactctgatcagagtccgtg

SEQ ID NO: 274 - DNA, 24 bp, Artificial sequence
  Primer
cccagactctgatcagagtctggg

SEQ ID NO: 275 - DNA, 24 bp, Artificial sequence
  Primer
ctcggactctgatcagagtccgag

SEQ ID NO: 276 - DNA, 24 bp, Artificial sequence
  Primer
ccctgactctgatcagagtcaggg

SEQ ID NO: 277 - DNA, 24 bp, Artificial sequence
  Primer
ccacgactctgatcagagtcgtgg

SEQ ID NO: 278 - DNA, 24 bp, Artificial sequence
  Primer
agccgactctgatcagagtcggct

SEQ ID NO: 279 - DNA, 24 bp, Artificial sequence
  Primer
tgccgactctgatcagagtcggca

SEQ ID NO: 280 - DNA, 24 bp, Artificial sequence
  Primer
gcgagactctgatcagagtctcgc

SEQ ID NO: 281 - DNA, 24 bp, Artificial sequence
  Primer
gcgtgactctgatcagagtcacgc

SEQ ID NO: 282 - DNA, 24 bp, Artificial sequence
  Primer
gcaggactctgatcagagtcctgc

SEQ ID NO: 283 - DNA, 24 bp, Artificial sequence
  Primer
gctggactctgatcagagtccagc

SEQ ID NO: 284 - DNA, 24 bp, Artificial sequence
  Primer
cgaggactctgatcagagtcctcg

SEQ ID NO: 285 - DNA, 24 bp, Artificial sequence
  Primer
cgtggactctgatcagagtccacg

SEQ ID NO: 286 - DNA, 24 bp, Artificial sequence
  Primer
caccgactctgatcagagtcggtg

SEQ ID NO: 287 - DNA, 24 bp, Artificial sequence
  Primer
ctccgactctgatcagagtcggag

SEQ ID NO: 288 - DNA, 24 bp, Artificial sequence
  Primer
gcgggactctgatcagagtcccgc

SEQ ID NO: 289 - DNA, 24 bp, Artificial sequence
  Primer
gagggactctgatcagagtccctc

SEQ ID NO: 290 - DNA, 24 bp, Artificial sequence
  Primer
gtgggactctgatcagagtcccac

SEQ ID NO: 291 - DNA, 24 bp, Artificial sequence
  Primer
  misc_feature (1)..(4): n is a, c, g, or t
  misc_feature (21)..(24): n is a, c, g, or t
nnnngactctgtacagagtcnnnn

SEQ ID NO: 292 - DNA, 24 bp, Artificial sequence
  Primer
ggcggactctgtacagagtccgcc

SEQ ID NO: 293 - DNA, 24 bp, Artificial sequence
  Primer
agcggactctgtacagagtccgct

SEQ ID NO: 294 - DNA, 24 bp, Artificial sequence
  Primer
gacggactctgtacagagtccgtc

SEQ ID NO: 295 - DNA, 24 bp, Artificial sequence
  Primer
ggaggactctgtacagagtcctcc

SEQ ID NO: 296 - DNA, 24 bp, Artificial sequence
  Primer
ggcagactctgtacagagtctgcc

SEQ ID NO: 297 - DNA, 24 bp, Artificial sequence
  Primer
tgcggactctgtacagagtccgca

SEQ ID NO: 298 - DNA, 24 bp, Artificial sequence
  Primer
gtcggactctgtacagagtccgac

SEQ ID NO: 299 - DNA, 24 bp, Artificial sequence
  Primer
ggtggactctgtacagagtccacc

SEQ ID NO: 300 - DNA, 24 bp, Artificial sequence
  Primer
ggctgactctgtacagagtcagcc

SEQ ID NO: 301 - DNA, 24 bp, Artificial sequence
  Primer
gcccgactctgtacagagtcgggc

SEQ ID NO: 302 - DNA, 24 bp, Artificial sequence
  Primer
acccgactctgtacagagtcgggt

SEQ ID NO: 303 - DNA, 24 bp, Artificial sequence
  Primer
gaccgactctgtacagagtcggtc

SEQ ID NO: 304 - DNA, 24 bp, Artificial sequence
  Primer
gcacgactctgtacagagtcgtgc

SEQ ID NO: 305 - DNA, 24 bp, Artificial sequence
  Primer
gccagactctgtacagagtctggc

SEQ ID NO: 306 - DNA, 24 bp, Artificial sequence
  Primer
tcccgactctgtacagagtcggga

SEQ ID NO: 307 - DNA, 24 bp, Artificial sequence
  Primer
gtccgactctgtacagagtcggac

SEQ ID NO: 308 - DNA, 24 bp, Artificial sequence
  Primer
gcctgactctgtacagagtcaggc

SEQ ID NO: 309 - DNA, 24 bp, Artificial sequence
  Primer
gggcgactctgtacagagtcgccc

SEQ ID NO: 310 - DNA, 24 bp, Artificial sequence
  Primer
aggcgactctgtacagagtcgcct

SEQ ID NO: 311 - DNA, 24 bp, Artificial sequence
  Primer
gagcgactctgtacagagtcgctc

SEQ ID NO: 312 - DNA, 24 bp, Artificial sequence
  Primer
ggacgactctgtacagagtcgtcc

SEQ ID NO: 313 - DNA, 24 bp, Artificial sequence
  Primer
gggagactctgtacagagtctccc

SEQ ID NO: 314 - DNA, 24 bp, Artificial sequence
  Primer
tggcgactctgtacagagtcgcca

SEQ ID NO: 315 - DNA, 24 bp, Artificial sequence
  Primer
gtgcgactctgtacagagtcgcac

SEQ ID NO: 316 - DNA, 24 bp, Artificial sequence
  Primer
gggtgactctgtacagagtcaccc

SEQ ID NO: 317 - DNA, 24 bp, Artificial sequence
  Primer
acgggactctgtacagagtcccgt

SEQ ID NO: 318 - DNA, 24 bp, Artificial sequence
  Primer
cagggactctgtacagagtccctg

SEQ ID NO: 319 - DNA, 24 bp, Artificial sequence
  Primer
ccaggactctgtacagagtcctgg

SEQ ID NO: 320 - DNA, 24 bp, Artificial sequence
  Primer
ccgagactctgtacagagtctcgg

SEQ ID NO: 321 - DNA, 24 bp, Artificial sequence
  Primer
tcgggactctgtacagagtcccga

SEQ ID NO: 322 - DNA, 24 bp, Artificial sequence
  Primer
ctgggactctgtacagagtcccag

SEQ ID NO: 323 - DNA, 24 bp, Artificial sequence
  Primer
cctggactctgtacagagtccagg

SEQ ID NO: 324 - DNA, 24 bp, Artificial sequence
  Primer
ccgtgactctgtacagagtcacgg

SEQ ID NO: 325 - DNA, 24 bp, Artificial sequence
  Primer
cggcgactctgtacagagtcgccg

SEQ ID NO: 326 - DNA, 24 bp, Artificial sequence
  Primer
cagcgactctgtacagagtcgctg

SEQ ID NO: 327 - DNA, 24 bp, Artificial sequence
  Primer
cgacgactctgtacagagtcgtcg

SEQ ID NO: 328 - DNA, 24 bp, Artificial sequence
  Primer
cggagactctgtacagagtctccg

SEQ ID NO: 329 - DNA, 24 bp, Artificial sequence
  Primer
ctgcgactctgtacagagtcgcag

SEQ ID NO: 330 - DNA, 24 bp, Artificial sequence
  Primer
cggtgactctgtacagagtcaccg

SEQ ID NO: 331 - DNA, 24 bp, Artificial sequence
  Primer
cacggactctgtacagagtccgtg

SEQ ID NO: 332 - DNA, 24 bp, Artificial sequence
  Primer
cccagactctgtacagagtctggg

SEQ ID NO: 333 - DNA, 24 bp, Artificial sequence
  Primer
ctcggactctgtacagagtccgag

SEQ ID NO: 334 - DNA, 24 bp, Artificial sequence
  Primer
ccctgactctgtacagagtcaggg

SEQ ID NO: 335 - DNA, 24 bp, Artificial sequence
  Primer
ccacgactctgtacagagtcgtgg

SEQ ID NO: 336 - DNA, 24 bp, Artificial sequence
  Primer
agccgactctgtacagagtcggct

SEQ ID NO: 337 - DNA, 24 bp, Artificial sequence
  Primer
tgccgactctgtacagagtcggca

SEQ ID NO: 338 - DNA, 24 bp, Artificial sequence
  Primer
gcgagactctgtacagagtctcgc

SEQ ID NO: 339 - DNA, 24 bp, Artificial sequence
  Primer
gcgtgactctgtacagagtcacgc

SEQ ID NO: 340 - DNA, 24 bp, Artificial sequence
  Primer
gcaggactctgtacagagtcctgc

SEQ ID NO: 341 - DNA, 24 bp, Artificial sequence
  Primer
gctggactctgtacagagtccagc

SEQ ID NO: 342 - DNA, 24 bp, Artificial sequence
  Primer
cgaggactctgtacagagtcctcg

SEQ ID NO: 343 - DNA, 24 bp, Artificial sequence
  Primer
cgtggactctgtacagagtccacg

SEQ ID NO: 344 - DNA, 24 bp, Artificial sequence
  Primer
caccgactctgtacagagtcggtg

SEQ ID NO: 345 - DNA, 24 bp, Artificial sequence
  Primer
ctccgactctgtacagagtcggag

SEQ ID NO: 346 - DNA, 24 bp, Artificial sequence
  Primer
gcgggactctgtacagagtcccgc

SEQ ID NO: 347 - DNA, 24 bp, Artificial sequence
  Primer
gagggactctgtacagagtccctc

SEQ ID NO: 348 - DNA, 24 bp, Artificial sequence
  Primer
gtgggactctgtacagagtcccac

SEQ ID NO: 349 - DNA, 24 bp, Artificial sequence
  Primer
  misc_feature (1)..(4): n is a, c, g, or t
  misc_feature (21)..(24): n is a, c, g, or t
nnnngactctggccagagtcnnnn

SEQ ID NO: 350 - DNA, 24 bp, Artificial sequence
  Primer
ggcggactctggccagagtccgcc

SEQ ID NO: 351 - DNA, 24 bp, Artificial sequence
  Primer
agcggactctggccagagtccgct

SEQ ID NO: 352 - DNA, 24 bp, Artificial sequence
  Primer
gacggactctggccagagtccgtc

SEQ ID NO: 353 - DNA, 24 bp, Artificial sequence
  Primer
ggaggactctggccagagtcctcc

SEQ ID NO: 354 - DNA, 24 bp, Artificial sequence
  Primer
ggcagactctggccagagtctgcc

SEQ ID NO: 355 - DNA, 24 bp, Artificial sequence
  Primer
tgcggactctggccagagtccgca

SEQ ID NO: 356 - DNA, 24 bp, Artificial sequence
  Primer
gtcggactctggccagagtccgac

SEQ ID NO: 357 - DNA, 24 bp, Artificial sequence
  Primer
ggtggactctggccagagtccacc

SEQ ID NO: 358 - DNA, 24 bp, Artificial sequence
  Primer
ggctgactctggccagagtcagcc

SEQ ID NO: 359 - DNA, 24 bp, Artificial sequence
  Primer
gcccgactctggccagagtcgggc

SEQ ID NO: 360 - DNA, 24 bp, Artificial sequence
  Primer
acccgactctggccagagtcgggt

SEQ ID NO: 361 - DNA, 24 bp, Artificial sequence
  Primer
gaccgactctggccagagtcggtc

SEQ ID NO: 362 - DNA, 24 bp, Artificial sequence
  Primer
gcacgactctggccagagtcgtgc

SEQ ID NO: 363 - DNA, 24 bp, Artificial sequence
  Primer
gccagactctggccagagtctggc

SEQ ID NO: 364 - DNA, 24 bp, Artificial sequence
  Primer
tcccgactctggccagagtcggga

SEQ ID NO: 365 - DNA, 24 bp, Artificial sequence
  Primer
gtccgactctggccagagtcggac

SEQ ID NO: 366 - DNA, 24 bp, Artificial sequence
  Primer
gcctgactctggccagagtcaggc

SEQ ID NO: 367 - DNA, 24 bp, Artificial sequence
  Primer
gggcgactctggccagagtcgccc

SEQ ID NO: 368 - DNA, 24 bp, Artificial sequence
  Primer
aggcgactctggccagagtcgcct

SEQ ID NO: 369 - DNA, 24 bp, Artificial sequence
  Primer
gagcgactctggccagagtcgctc

SEQ ID NO: 370 - DNA, 24 bp, Artificial sequence
  Primer
ggacgactctggccagagtcgtcc

SEQ ID NO: 371 - DNA, 24 bp, Artificial sequence
  Primer
gggagactctggccagagtctccc

SEQ ID NO: 372 - DNA, 24 bp, Artificial sequence
  Primer
tggcgactctggccagagtcgcca

SEQ ID NO: 373 - DNA, 24 bp, Artificial sequence
  Primer
gtgcgactctggccagagtcgcac

SEQ ID NO: 374 - DNA, 24 bp, Artificial sequence
  Primer
gggtgactctggccagagtcaccc

SEQ ID NO: 375 - DNA, 24 bp, Artificial sequence
  Primer
acgggactctggccagagtcccgt

SEQ ID NO: 376 - DNA, 24 bp, Artificial sequence
  Primer
cagggactctggccagagtccctg

SEQ ID NO: 377 - DNA, 24 bp, Artificial sequence
  Primer
ccaggactctggccagagtcctgg

SEQ ID NO: 378 - DNA, 24 bp, Artificial sequence
  Primer
ccgagactctggccagagtctcgg

SEQ ID NO: 379 - DNA, 24 bp, Artificial sequence
  Primer
tcgggactctggccagagtcccga

SEQ ID NO: 380 - DNA, 24 bp, Artificial sequence
  Primer
ctgggactctggccagagtcccag

SEQ ID NO: 381 - DNA, 24 bp, Artificial sequence
  Primer
cctggactctggccagagtccagg

SEQ ID NO: 382 - DNA, 24 bp, Artificial sequence
  Primer
ccgtgactctggccagagtcacgg

SEQ ID NO: 383 - DNA, 24 bp, Artificial sequence
  Primer
cggcgactctggccagagtcgccg

SEQ ID NO: 384 - DNA, 24 bp, Artificial sequence
  Primer
cagcgactctggccagagtcgctg

SEQ ID NO: 385 - DNA, 24 bp, Artificial sequence
  Primer
cgacgactctggccagagtcgtcg

SEQ ID NO: 386 - DNA, 24 bp, Artificial sequence
  Primer
cggagactctggccagagtctccg

SEQ ID NO: 387 - DNA, 24 bp, Artificial sequence
  Primer
ctgcgactctggccagagtcgcag

SEQ ID NO: 388 - DNA, 24 bp, Artificial sequence
  Primer
cggtgactctggccagagtcaccg

SEQ ID NO: 389 - DNA, 24 bp, Artificial sequence
  Primer
cacggactctggccagagtccgtg

SEQ ID NO: 390 - DNA, 24 bp, Artificial sequence
  Primer
cccagactctggccagagtctggg

SEQ ID NO: 391 - DNA, 24 bp, Artificial sequence
  Primer
ctcggactctggccagagtccgag

SEQ ID NO: 392 - DNA, 24 bp, Artificial sequence
  Primer
ccctgactctggccagagtcaggg

SEQ ID NO: 393 - DNA, 24 bp, Artificial sequence
  Primer
ccacgactctggccagagtcgtgg

SEQ ID NO: 394 - DNA, 24 bp, Artificial sequence
  Primer
agccgactctggccagagtcggct

SEQ ID NO: 395 - DNA, 24 bp, Artificial sequence
  Primer
tgccgactctggccagagtcggca

SEQ ID NO: 396 - DNA, 24 bp, Artificial sequence
  Primer
gcgagactctggccagagtctcgc

SEQ ID NO: 397 - DNA, 24 bp, Artificial sequence
  Primer
gcgtgactctggccagagtcacgc

SEQ ID NO: 398 - DNA, 24 bp, Artificial sequence
  Primer
gcaggactctggccagagtcctgc

SEQ ID NO: 399 - DNA, 24 bp, Artificial sequence
  Primer
gctggactctggccagagtccagc

SEQ ID NO: 400 - DNA, 24 bp, Artificial sequence
  Primer
cgaggactctggccagagtcctcg

SEQ ID NO: 401 - DNA, 24 bp, Artificial sequence
  Primer
cgtggactctggccagagtccacg

SEQ ID NO: 402 - DNA, 24 bp, Artificial sequence
  Primer
caccgactctggccagagtcggtg

SEQ ID NO: 403 - DNA, 24 bp, Artificial sequence
  Primer
ctccgactctggccagagtcggag

SEQ ID NO: 404 - DNA, 24 bp, Artificial sequence
  Primer
gcgggactctggccagagtcccgc

SEQ ID NO: 405 - DNA, 24 bp, Artificial sequence
  Primer
gagggactctggccagagtccctc

SEQ ID NO: 406 - DNA, 24 bp, Artificial sequence
  Primer
gtgggactctggccagagtcccac

SEQ ID NO: 407 - DNA, 24 bp, Artificial sequence
  Primer
  misc_feature (1)..(4): n is a, c, g, or t
  misc_feature (21)..(24): n is a, c, g, or t
nnnngactctgcgcagagtcnnnn

SEQ ID NO: 408 - DNA, 24 bp, Artificial sequence
  Primer
ggcggactctgcgcagagtccgcc

SEQ ID NO: 409 - DNA, 24 bp, Artificial sequence
  Primer
agcggactctgcgcagagtccgct

SEQ ID NO: 410 - DNA, 24 bp, Artificial sequence
  Primer
gacggactctgcgcagagtccgtc

SEQ ID NO: 411 - DNA, 24 bp, Artificial sequence
  Primer
ggaggactctgcgcagagtcctcc

SEQ ID NO: 412 - DNA, 24 bp, Artificial sequence
  Primer
ggcagactctgcgcagagtctgcc

SEQ ID NO: 413 - DNA, 24 bp, Artificial sequence
  Primer
tgcggactctgcgcagagtccgca

SEQ ID NO: 414 - DNA, 24 bp, Artificial sequence
  Primer
gtcggactctgcgcagagtccgac

SEQ ID NO: 415 - DNA, 24 bp, Artificial sequence
  Primer
ggtggactctgcgcagagtccacc

SEQ ID NO: 416 - DNA, 24 bp, Artificial sequence
  Primer
ggctgactctgcgcagagtcagcc

SEQ ID NO: 417 - DNA, 24 bp, Artificial sequence
  Primer
gcccgactctgcgcagagtcgggc

SEQ ID NO: 418 - DNA, 24 bp, Artificial sequence
  Primer
acccgactctgcgcagagtcgggt

SEQ ID NO: 419 - DNA, 24 bp, Artificial sequence
  Primer
gaccgactctgcgcagagtcggtc

SEQ ID NO: 420 - DNA, 24 bp, Artificial sequence
  Primer
gcacgactctgcgcagagtcgtgc

SEQ ID NO: 421 - DNA, 24 bp, Artificial sequence
  Primer
gccagactctgcgcagagtctggc

SEQ ID NO: 422 - DNA, 24 bp, Artificial sequence
  Primer
tcccgactctgcgcagagtcggga

SEQ ID NO: 423 - DNA, 24 bp, Artificial sequence
  Primer
gtccgactctgcgcagagtcggac

SEQ ID NO: 424 - DNA, 24 bp, Artificial sequence
  Primer
gcctgactctgcgcagagtcaggc

SEQ ID NO: 425 - DNA, 24 bp, Artificial sequence
  Primer
gggcgactctgcgcagagtcgccc

SEQ ID NO: 426 - DNA, 24 bp, Artificial sequence
  Primer
aggcgactctgcgcagagtcgcct

SEQ ID NO: 427 - DNA, 24 bp, Artificial sequence
  Primer
gagcgactctgcgcagagtcgctc

SEQ ID NO: 428 - DNA, 24 bp, Artificial sequence
  Primer
ggacgactctgcgcagagtcgtcc

SEQ ID NO: 429 - DNA, 24 bp, Artificial sequence
  Primer
gggagactctgcgcagagtctccc

SEQ ID NO: 430 - DNA, 24 bp, Artificial sequence
  Primer
tggcgactctgcgcagagtcgcca

SEQ ID NO: 431 - DNA, 24 bp, Artificial sequence
  Primer
gtgcgactctgcgcagagtcgcac

SEQ ID NO: 432 - DNA, 24 bp, Artificial sequence
  Primer
gggtgactctgcgcagagtcaccc

SEQ ID NO: 433 - DNA, 24 bp, Artificial sequence
  Primer
acgggactctgcgcagagtcccgt

SEQ ID NO: 434 - DNA, 24 bp, Artificial sequence
  Primer
cagggactctgcgcagagtccctg

SEQ ID NO: 435 - DNA, 24 bp, Artificial sequence
  Primer
ccaggactctgcgcagagtcctgg

SEQ ID NO: 436 - DNA, 24 bp, Artificial sequence
  Primer
ccgagactctgcgcagagtctcgg

SEQ ID NO: 437 - DNA, 24 bp, Artificial sequence
  Primer
tcgggactctgcgcagagtcccga

SEQ ID NO: 438 - DNA, 24 bp, Artificial sequence
  Primer
ctgggactctgcgcagagtcccag

SEQ ID NO: 439 - DNA, 24 bp, Artificial sequence
  Primer
cctggactctgcgcagagtccagg

SEQ ID NO: 440 - DNA, 24 bp, Artificial sequence
  Primer
ccgtgactctgcgcagagtcacgg

SEQ ID NO: 441 - DNA, 24 bp, Artificial sequence
  Primer
cggcgactctgcgcagagtcgccg

SEQ ID NO: 442 - DNA, 24 bp, Artificial sequence
  Primer
cagcgactctgcgcagagtcgctg

SEQ ID NO: 443 - DNA, 24 bp, Artificial sequence
  Primer
cgacgactctgcgcagagtcgtcg

SEQ ID NO: 444 - DNA, 24 bp, Artificial sequence
  Primer
cggagactctgcgcagagtctccg

SEQ ID NO: 445 - DNA, 24 bp, Artificial sequence
  Primer
ctgcgactctgcgcagagtcgcag

SEQ ID NO: 446 - DNA, 24 bp, Artificial sequence
  Primer
cggtgactctgcgcagagtcaccg

SEQ ID NO: 447 - DNA, 24 bp, Artificial sequence
  Primer
cacggactctgcgcagagtccgtg

SEQ ID NO: 448 - DNA, 24 bp, Artificial sequence
  Primer
cccagactctgcgcagagtctggg

SEQ ID NO: 449 - DNA, 24 bp, Artificial sequence
  Primer
ctcggactctgcgcagagtccgag

SEQ ID NO: 450 - DNA, 24 bp, Artificial sequence
  Primer
ccctgactctgcgcagagtcaggg

SEQ ID NO: 451 - DNA, 24 bp, Artificial sequence
  Primer
ccacgactctgcgcagagtcgtgg

SEQ ID NO: 452 - DNA, 24 bp, Artificial sequence
  Primer
agccgactctgcgcagagtcggct

SEQ ID NO: 453 - DNA, 24 bp, Artificial sequence
  Primer
tgccgactctgcgcagagtcggca

SEQ ID NO: 454 - DNA, 24 bp, Artificial sequence
  Primer
gcgagactctgcgcagagtctcgc

SEQ ID NO: 455 - DNA, 24 bp, Artificial sequence
  Primer
gcgtgactctgcgcagagtcacgc

SEQ ID NO: 456 - DNA, 24 bp, Artificial sequence
  Primer
gcaggactctgcgcagagtcctgc

SEQ ID NO: 457 - DNA, 24 bp, Artificial sequence
  Primer
gctggactctgcgcagagtccagc

SEQ ID NO: 458 - DNA, 24 bp, Artificial sequence
  Primer
cgaggactctgcgcagagtcctcg

SEQ ID NO: 459 - DNA, 24 bp, Artificial sequence
  Primer
cgtggactctgcgcagagtccacg

SEQ ID NO: 460 - DNA, 24 bp, Artificial sequence
  Primer
caccgactctgcgcagagtcggtg

SEQ ID NO: 461 - DNA, 24 bp, Artificial sequence
  Primer
ctccgactctgcgcagagtcggag

SEQ ID NO: 462 - DNA, 24 bp, Artificial sequence
  Primer
gcgggactctgcgcagagtcccgc

SEQ ID NO: 463 - DNA, 24 bp, Artificial sequence
  Primer
gagggactctgcgcagagtccctc

SEQ ID NO: 464 - DNA, 24 bp, Artificial sequence
  Primer
gtgggactctgcgcagagtcccac

SEQ ID NO: 465 - DNA, 24 bp, Artificial sequence
  Primer
  misc_feature (1)..(4): n is a, c, g, or t
  misc_feature (21)..(24): n is a, c, g, or t
nnnngactcgcatgcgagtcnnnn

SEQ ID NO: 466 - DNA, 24 bp, Artificial sequence
  Primer
ggcggactcgcatgcgagtccgcc

SEQ ID NO: 467 - DNA, 24 bp, Artificial sequence
  Primer
agcggactcgcatgcgagtccgct

SEQ ID NO: 468 - DNA, 24 bp, Artificial sequence
  Primer
gacggactcgcatgcgagtccgtc

SEQ ID NO: 469 - DNA, 24 bp, Artificial sequence
  Primer
ggaggactcgcatgcgagtcctcc

SEQ ID NO: 470 - DNA, 24 bp, Artificial sequence
  Primer
ggcagactcgcatgcgagtctgcc

SEQ ID NO: 471 - DNA, 24 bp, Artificial sequence
  Primer
tgcggactcgcatgcgagtccgca

SEQ ID NO: 472 - DNA, 24 bp, Artificial sequence
  Primer
gtcggactcgcatgcgagtccgac

SEQ ID NO: 473 - DNA, 24 bp, Artificial sequence
  Primer
ggtggactcgcatgcgagtccacc

SEQ ID NO: 474 - DNA, 24 bp, Artificial sequence
  Primer
ggctgactcgcatgcgagtcagcc

SEQ ID NO: 475 - DNA, 24 bp, Artificial sequence
  Primer
gcccgactcgcatgcgagtcgggc

SEQ ID NO: 476 - DNA, 24 bp, Artificial sequence
  Primer
acccgactcgcatgcgagtcgggt

SEQ ID NO: 477 - DNA, 24 bp, Artificial sequence
  Primer
gaccgactcgcatgcgagtcggtc

SEQ ID NO: 478 - DNA, 24 bp, Artificial sequence
  Primer
gcacgactcgcatgcgagtcgtgc

SEQ ID NO: 479 - DNA, 24 bp, Artificial sequence
  Primer
gccagactcgcatgcgagtctggc

SEQ ID NO: 480 - DNA, 24 bp, Artificial sequence
  Primer
tcccgactcgcatgcgagtcggga

SEQ ID NO: 481 - DNA, 24 bp, Artificial sequence
  Primer
gtccgactcgcatgcgagtcggac

SEQ ID NO: 482 - DNA, 24 bp, Artificial sequence
  Primer
gcctgactcgcatgcgagtcaggc

SEQ ID NO: 483 - DNA, 24 bp, Artificial sequence
  Primer
gggcgactcgcatgcgagtcgccc

SEQ ID NO: 484 - DNA, 24 bp, Artificial sequence
  Primer
aggcgactcgcatgcgagtcgcct

SEQ ID NO: 485 - DNA, 24 bp, Artificial sequence
  Primer
gagcgactcgcatgcgagtcgctc

SEQ ID NO: 486 - DNA, 24 bp, Artificial sequence
  Primer
ggacgactcgcatgcgagtcgtcc

SEQ ID NO: 487 - DNA, 24 bp, Artificial sequence
  Primer
gggagactcgcatgcgagtctccc

SEQ ID NO: 488 - DNA, 24 bp, Artificial sequence
  Primer
tggcgactcgcatgcgagtcgcca

SEQ ID NO: 489 - DNA, 24 bp, Artificial sequence
  Primer
gtgcgactcgcatgcgagtcgcac

SEQ ID NO: 490 - DNA, 24 bp, Artificial sequence
  Primer
gggtgactcgcatgcgagtcaccc

SEQ ID NO: 491 - DNA, 24 bp, Artificial sequence
  Primer
acgggactcgcatgcgagtcccgt

SEQ ID NO: 492 - DNA, 24 bp, Artificial sequence
  Primer
cagggactcgcatgcgagtccctg

SEQ ID NO: 493 - DNA, 24 bp, Artificial sequence
  Primer
ccaggactcgcatgcgagtcctgg

SEQ ID NO: 494 - DNA, 24 bp, Artificial sequence
  Primer
ccgagactcgcatgcgagtctcgg

SEQ ID NO: 495 - DNA, 24 bp, Artificial sequence
  Primer
tcgggactcgcatgcgagtcccga

SEQ ID NO: 496 - DNA, 24 bp, Artificial sequence
  Primer
ctgggactcgcatgcgagtcccag

SEQ ID NO: 497 - DNA, 24 bp, Artificial sequence
  Primer
cctggactcgcatgcgagtccagg

SEQ ID NO: 498 - DNA, 24 bp, Artificial sequence
  Primer
ccgtgactcgcatgcgagtcacgg

SEQ ID NO: 499 - DNA, 24 bp, Artificial sequence
  Primer
cggcgactcgcatgcgagtcgccg

SEQ ID NO: 500 - DNA, 24 bp, Artificial sequence
  Primer
cagcgactcgcatgcgagtcgctg

SEQ ID NO: 501 - DNA, 24 bp, Artificial sequence
  Primer
cgacgactcgcatgcgagtcgtcg

SEQ ID NO: 502 - DNA, 24 bp, Artificial sequence
  Primer
cggagactcgcatgcgagtctccg

SEQ ID NO: 503 - DNA, 24 bp, Artificial sequence
  Primer
ctgcgactcgcatgcgagtcgcag

SEQ ID NO: 504 - DNA, 24 bp, Artificial sequence
  Primer
cggtgactcgcatgcgagtcaccg

SEQ ID NO: 505 - DNA, 24 bp, Artificial sequence
  Primer
cacggactcgcatgcgagtccgtg

SEQ ID NO: 506 - DNA, 24 bp, Artificial sequence
  Primer
cccagactcgcatgcgagtctggg

SEQ ID NO: 507 - DNA, 24 bp, Artificial sequence
  Primer
ctcggactcgcatgcgagtccgag

SEQ ID NO: 508 - DNA, 24 bp, Artificial sequence
  Primer
ccctgactcgcatgcgagtcaggg

SEQ ID NO: 509 - DNA, 24 bp, Artificial sequence
  Primer
ccacgactcgcatgcgagtcgtgg

SEQ ID NO: 510 - DNA, 24 bp, Artificial sequence
  Primer
agccgactcgcatgcgagtcggct

SEQ ID NO: 511 - DNA, 24 bp, Artificial sequence
  Primer
tgccgactcgcatgcgagtcggca

SEQ ID NO: 512 - DNA, 24 bp, Artificial sequence
  Primer
gcgagactcgcatgcgagtctcgc

SEQ ID NO: 513 - DNA, 24 bp, Artificial sequence
  Primer
gcgtgactcgcatgcgagtcacgc

SEQ ID NO: 514 - DNA, 24 bp, Artificial sequence
  Primer
gcaggactcgcatgcgagtcctgc

SEQ ID NO: 515 - DNA, 24 bp, Artificial sequence
  Primer
gctggactcgcatgcgagtccagc

SEQ ID NO: 516 - DNA, 24 bp, Artificial sequence
  Primer
cgaggactcgcatgcgagtcctcg

SEQ ID NO: 517 - DNA, 24 bp, Artificial sequence
  Primer
cgtggactcgcatgcgagtccacg

SEQ ID NO: 518 - DNA, 24 bp, Artificial sequence
  Primer
caccgactcgcatgcgagtcggtg

SEQ ID NO: 519 - DNA, 24 bp, Artificial sequence
  Primer
ctccgactcgcatgcgagtcggag

SEQ ID NO: 520 - DNA, 24 bp, Artificial sequence
  Primer
gcgggactcgcatgcgagtcccgc

SEQ ID NO: 521 - DNA, 24 bp, Artificial sequence
  Primer
gagggactcgcatgcgagtccctc

SEQ ID NO: 522 - DNA, 24 bp, Artificial sequence
  Primer
gtgggactcgcatgcgagtcccac

SEQ ID NO: 523 - DNA, 24 bp, Artificial sequence
  Primer
  misc_feature (1)..(4): n is a, c, g, or t
  misc_feature (21)..(24): n is a, c, g, or t
nnnngactcgctagcgagtcnnnn

SEQ ID NO: 524 - DNA, 24 bp, Artificial sequence
  Primer
ggcggactcgctagcgagtccgcc

SEQ ID NO: 525 - DNA, 24 bp, Artificial sequence
  Primer
agcggactcgctagcgagtccgct

SEQ ID NO: 526 - DNA, 24 bp, Artificial sequence
  Primer
gacggactcgctagcgagtccgtc

SEQ ID NO: 527 - DNA, 24 bp, Artificial sequence
  Primer
ggaggactcgctagcgagtcctcc

SEQ ID NO: 528 - DNA, 24 bp, Artificial sequence
  Primer
ggcagactcgctagcgagtctgcc

SEQ ID NO: 529 - DNA, 24 bp, Artificial sequence
  Primer
tgcggactcgctagcgagtccgca

SEQ ID NO: 530 - DNA, 24 bp, Artificial sequence
  Primer
gtcggactcgctagcgagtccgac

SEQ ID NO: 531 - DNA, 24 bp, Artificial sequence
  Primer
ggtggactcgctagcgagtccacc

SEQ ID NO: 532 - DNA, 24 bp, Artificial sequence
  Primer
ggctgactcgctagcgagtcagcc

SEQ ID NO: 533 - DNA, 24 bp, Artificial sequence
  Primer
gcccgactcgctagcgagtcgggc

SEQ ID NO: 534 - DNA, 24 bp, Artificial sequence
  Primer
acccgactcgctagcgagtcgggt

SEQ ID NO: 535 - DNA, 24 bp, Artificial sequence
  Primer
gaccgactcgctagcgagtcggtc

SEQ ID NO: 536 - DNA, 24 bp, Artificial sequence
  Primer
gcacgactcgctagcgagtcgtgc

SEQ ID NO: 537 - DNA, 24 bp, Artificial sequence
  Primer
gccagactcgctagcgagtctggc

SEQ ID NO: 538 - DNA, 24 bp, Artificial sequence
  Primer
tcccgactcgctagcgagtcggga

SEQ ID NO: 539 - DNA, 24 bp, Artificial sequence
  Primer
gtccgactcgctagcgagtcggac

SEQ ID NO: 540 - DNA, 24 bp, Artificial sequence
  Primer
gcctgactcgctagcgagtcaggc

SEQ ID NO: 541 - DNA, 24 bp, Artificial sequence
  Primer
gggcgactcgctagcgagtcgccc

SEQ ID NO: 542 - DNA, 24 bp, Artificial sequence
  Primer
aggcgactcgctagcgagtcgcct

SEQ ID NO: 543 - DNA, 24 bp, Artificial sequence
  Primer
gagcgactcgctagcgagtcgctc

SEQ ID NO: 544 - DNA, 24 bp, Artificial sequence
  Primer
ggacgactcgctagcgagtcgtcc

SEQ ID NO: 545 - DNA, 24 bp, Artificial sequence
  Primer
gggagactcgctagcgagtctccc

SEQ ID NO: 546 - DNA, 24 bp, Artificial sequence
  Primer
tggcgactcgctagcgagtcgcca

SEQ ID NO: 547 - DNA, 24 bp, Artificial sequence
  Primer
gtgcgactcgctagcgagtcgcac

SEQ ID NO: 548 - DNA, 24 bp, Artificial sequence
  Primer
gggtgactcgctagcgagtcaccc

SEQ ID NO: 549 - DNA, 24 bp, Artificial sequence
  Primer
acgggactcgctagcgagtcccgt

SEQ ID NO: 550 - DNA, 24 bp, Artificial sequence
  Primer
cagggactcgctagcgagtccctg

SEQ ID NO: 551 - DNA, 24 bp, Artificial sequence
  Primer
ccaggactcgctagcgagtcctgg

SEQ ID NO: 552 - DNA, 24 bp, Artificial sequence
  Primer
ccgagactcgctagcgagtctcgg

SEQ ID NO: 553 - DNA, 24 bp, Artificial sequence
  Primer
tcgggactcgctagcgagtcccga

SEQ ID NO: 554 - DNA, 24 bp, Artificial sequence
  Primer
ctgggactcgctagcgagtcccag

SEQ ID NO: 555 - DNA, 24 bp, Artificial sequence
  Primer
cctggactcgctagcgagtccagg

SEQ ID NO: 556 - DNA, 24 bp, Artificial sequence
  Primer
ccgtgactcgctagcgagtcacgg

SEQ ID NO: 557 - DNA, 24 bp, Artificial sequence
  Primer
cggcgactcgctagcgagtcgccg

SEQ ID NO: 558 - DNA, 24 bp, Artificial sequence
  Primer
cagcgactcgctagcgagtcgctg

SEQ ID NO: 559 - DNA, 24 bp, Artificial sequence
  Primer
cgacgactcgctagcgagtcgtcg

SEQ ID NO: 560 - DNA, 24 bp, Artificial sequence
  Primer
cggagactcgctagcgagtctccg

SEQ ID NO: 561 - DNA, 24 bp, Artificial sequence
  Primer
ctgcgactcgctagcgagtcgcag

SEQ ID NO: 562 - DNA, 24 bp, Artificial sequence
  Primer
cggtgactcgctagcgagtcaccg

SEQ ID NO: 563 - DNA, 24 bp, Artificial sequence
  Primer
cacggactcgctagcgagtccgtg

SEQ ID NO: 564 - DNA, 24 bp, Artificial sequence
  Primer
cccagactcgctagcgagtctggg

SEQ ID NO: 565 - DNA, 24 bp, Artificial sequence
  Primer
ctcggactcgctagcgagtccgag

SEQ ID NO: 566 - DNA, 24 bp, Artificial sequence
  Primer
ccctgactcgctagcgagtcaggg

SEQ ID NO: 567 - DNA, 24 bp, Artificial sequence
  Primer
ccacgactcgctagcgagtcgtgg

SEQ ID NO: 568 - DNA, 24 bp, Artificial sequence
  Primer
agccgactcgctagcgagtcggct

SEQ ID NO: 569 - DNA, 24 bp, Artificial sequence
  Primer
tgccgactcgctagcgagtcggca

SEQ ID NO: 570 - DNA, 24 bp, Artificial sequence
  Primer
gcgagactcgctagcgagtctcgc

SEQ ID NO: 571 - DNA, 24 bp, Artificial sequence
  Primer
gcgtgactcgctagcgagtcacgc

SEQ ID NO: 572 - DNA, 24 bp, Artificial sequence
  Primer
gcaggactcgctagcgagtcctgc

SEQ ID NO: 573 - DNA, 24 bp, Artificial sequence
  Primer
gctggactcgctagcgagtccagc

SEQ ID NO: 574 - DNA, 24 bp, Artificial sequence
  Primer
cgaggactcgctagcgagtcctcg

SEQ ID NO: 575 - DNA, 24 bp, Artificial sequence
  Primer
cgtggactcgctagcgagtccacg

SEQ ID NO: 576 - DNA, 24 bp, Artificial sequence
  Primer
caccgactcgctagcgagtcggtg

SEQ ID NO: 577 - DNA, 24 bp, Artificial sequence
  Primer
ctccgactcgctagcgagtcggag

SEQ ID NO: 578 - DNA, 24 bp, Artificial sequence
  Primer
gcgggactcgctagcgagtcccgc

SEQ ID NO: 579 - DNA, 24 bp, Artificial sequence
  Primer
gagggactcgctagcgagtccctc

SEQ ID NO: 580 - DNA, 24 bp, Artificial sequence
  Primer
gtgggactcgctagcgagtcccac

SEQ ID NO: 581 - DNA, 24 bp, Artificial sequence
  Primer
  misc_feature (1)..(4): n is a, c, g, or t
  misc_feature (21)..(24): n is a, c, g, or t
nnnngactcgcgcgcgagtcnnnn

SEQ ID NO: 582 - DNA, 24 bp, Artificial sequence
  Primer
ggcggactcgcgcgcgagtccgcc

SEQ ID NO: 583 - DNA, 24 bp, Artificial sequence
  Primer
agcggactcgcgcgcgagtccgct

SEQ ID NO: 584 - DNA, 24 bp, Artificial sequence
  Primer
gacggactcgcgcgcgagtccgtc

SEQ ID NO: 585 - DNA, 24 bp, Artificial sequence
  Primer
ggaggactcgcgcgcgagtcctcc

SEQ ID NO: 586 - DNA, 24 bp, Artificial sequence
  Primer
ggcagactcgcgcgcgagtctgcc

SEQ ID NO: 587 - DNA, 24 bp, Artificial sequence
  Primer
tgcggactcgcgcgcgagtccgca

SEQ ID NO: 588 - DNA, 24 bp, Artificial sequence
  Primer
gtcggactcgcgcgcgagtccgac

SEQ ID NO: 589 - DNA, 24 bp, Artificial sequence
  Primer
ggtggactcgcgcgcgagtccacc

SEQ ID NO: 590 - DNA, 24 bp, Artificial sequence
  Primer
ggctgactcgcgcgcgagtcagcc

SEQ ID NO: 591 - DNA, 24 bp, Artificial sequence
  Primer
gcccgactcgcgcgcgagtcgggc

SEQ ID NO: 592 - DNA, 24 bp, Artificial sequence
  Primer
acccgactcgcgcgcgagtcgggt

SEQ ID NO: 593 - DNA, 24 bp, Artificial sequence
  Primer
gaccgactcgcgcgcgagtcggtc

SEQ ID NO: 594 - DNA, 24 bp, Artificial sequence
  Primer
gcacgactcgcgcgcgagtcgtgc

SEQ ID NO: 595 - DNA, 24 bp, Artificial sequence
  Primer
gccagactcgcgcgcgagtctggc

SEQ ID NO: 596 - DNA, 24 bp, Artificial sequence
  Primer
tcccgactcgcgcgcgagtcggga

SEQ ID NO: 597 - DNA, 24 bp, Artificial sequence
  Primer
gtccgactcgcgcgcgagtcggac

SEQ ID NO: 598 - DNA, 24 bp, Artificial sequence
  Primer
gcctgactcgcgcgcgagtcaggc

SEQ ID NO: 599 - DNA, 24 bp, Artificial sequence
  Primer
gggcgactcgcgcgcgagtcgccc

SEQ ID NO: 600 - DNA, 24 bp, Artificial sequence
  Primer
aggcgactcgcgcgcgagtcgcct

SEQ ID NO: 601 - DNA, 24 bp, Artificial sequence
  Primer
gagcgactcgcgcgcgagtcgctc

SEQ ID NO: 602 - DNA, 24 bp, Artificial sequence
  Primer
ggacgactcgcgcgcgagtcgtcc

SEQ ID NO: 603 - DNA, 24 bp, Artificial sequence
  Primer
gggagactcgcgcgcgagtctccc

SEQ ID NO: 604 - DNA, 24 bp, Artificial sequence
  Primer
tggcgactcgcgcgcgagtcgcca

SEQ ID NO: 605 - DNA, 24 bp, Artificial sequence
  Primer
gtgcgactcgcgcgcgagtcgcac

SEQ ID NO: 606 - DNA, 24 bp, Artificial sequence
  Primer
gggtgactcgcgcgcgagtcaccc

SEQ ID NO: 607 - DNA, 24 bp, Artificial sequence
  Primer
acgggactcgcgcgcgagtcccgt

SEQ ID NO: 608 - DNA, 24 bp, Artificial sequence
  Primer
cagggactcgcgcgcgagtccctg

SEQ ID NO: 609 - DNA, 24 bp, Artificial sequence
  Primer
ccaggactcgcgcgcgagtcctgg

SEQ ID NO: 610 - DNA, 24 bp, Artificial sequence
  Primer
ccgagactcgcgcgcgagtctcgg

SEQ ID NO: 611 - DNA, 24 bp, Artificial sequence
  Primer
tcgggactcgcgcgcgagtcccga

SEQ ID NO: 612 - DNA, 24 bp, Artificial sequence
  Primer
ctgggactcgcgcgcgagtcccag

SEQ ID NO: 613 - DNA, 24 bp, Artificial sequence
  Primer
cctggactcgcgcgcgagtccagg

SEQ ID NO: 614 - DNA, 24 bp, Artificial sequence
  Primer
ccgtgactcgcgcgcgagtcacgg

SEQ ID NO: 615 - DNA, 24 bp, Artificial sequence
  Primer
cggcgactcgcgcgcgagtcgccg

SEQ ID NO: 616 - DNA, 24 bp, Artificial sequence
  Primer
cagcgactcgcgcgcgagtcgctg

SEQ ID NO: 617 - DNA, 24 bp, Artificial sequence
  Primer
cgacgactcgcgcgcgagtcgtcg

SEQ ID NO: 618 - DNA, 24 bp, Artificial sequence
  Primer
cggagactcgcgcgcgagtctccg

SEQ ID NO: 619 - DNA, 24 bp, Artificial sequence
  Primer
ctgcgactcgcgcgcgagtcgcag

SEQ ID NO: 620 - DNA, 24 bp, Artificial sequence
  Primer
cggtgactcgcgcgcgagtcaccg

SEQ ID NO: 621 - DNA, 24 bp, Artificial sequence
  Primer
cacggactcgcgcgcgagtccgtg

SEQ ID NO: 622 - DNA, 24 bp, Artificial sequence
  Primer
cccagactcgcgcgcgagtctggg

SEQ ID NO: 623 - DNA, 24 bp, Artificial sequence
  Primer
ctcggactcgcgcgcgagtccgag

SEQ ID NO: 624 - DNA, 24 bp, Artificial sequence
  Primer
ccctgactcgcgcgcgagtcaggg

SEQ ID NO: 625 - DNA, 24 bp, Artificial sequence
  Primer
ccacgactcgcgcgcgagtcgtgg

SEQ ID NO: 626 - DNA, 24 bp, Artificial sequence
  Primer
agccgactcgcgcgcgagtcggct

SEQ ID NO: 627 - DNA, 24 bp, Artificial sequence
  Primer
tgccgactcgcgcgcgagtcggca

SEQ ID NO: 628 - DNA, 24 bp, Artificial sequence
  Primer
gcgagactcgcgcgcgagtctcgc

SEQ ID NO: 629 - DNA, 24 bp, Artificial sequence
  Primer
gcgtgactcgcgcgcgagtcacgc

SEQ ID NO: 630 - DNA, 24 bp, Artificial sequence
  Primer
gcaggactcgcgcgcgagtcctgc

SEQ ID NO: 631 - DNA, 24 bp, Artificial sequence
  Primer
gctggactcgcgcgcgagtccagc

SEQ ID NO: 632 - DNA, 24 bp, Artificial sequence
  Primer
cgaggactcgcgcgcgagtcctcg

SEQ ID NO: 633 - DNA, 24 bp, Artificial sequence
  Primer
cgtggactcgcgcgcgagtccacg

SEQ ID NO: 634 - DNA, 24 bp, Artificial sequence
  Primer
caccgactcgcgcgcgagtcggtg

SEQ ID NO: 635 - DNA, 24 bp, Artificial sequence
  Primer
ctccgactcgcgcgcgagtcggag

SEQ ID NO: 636 - DNA, 24 bp, Artificial sequence
  Primer
gcgggactcgcgcgcgagtcccgc

SEQ ID NO: 637 - DNA, 24 bp, Artificial sequence
  Primer
gagggactcgcgcgcgagtccctc

SEQ ID NO: 638 - DNA, 24 bp, Artificial sequence
  Primer
gtgggactcgcgcgcgagtcccac

SEQ ID NO: 639 - DNA, 24 bp, Artificial sequence
  Primer
  misc_feature (1)..(4): n is a, c, g, or t
  misc_feature (21)..(24): n is a, c, g, or t
nnnngactcgccggcgagtcnnnn

SEQ ID NO: 640 - DNA, 24 bp, Artificial sequence
  Primer
ggcggactcgccggcgagtccgcc

SEQ ID NO: 641 - DNA, 24 bp, Artificial sequence
  Primer
agcggactcgccggcgagtccgct

SEQ ID NO: 642 - DNA, 24 bp, Artificial sequence
  Primer
gacggactcgccggcgagtccgtc

SEQ ID NO: 643 - DNA, 24 bp, Artificial sequence
  Primer
ggaggactcgccggcgagtcctcc

SEQ ID NO: 644 - DNA, 24 bp, Artificial sequence
  Primer
ggcagactcgccggcgagtctgcc

SEQ ID NO: 645 - DNA, 24 bp, Artificial sequence
  Primer
tgcggactcgccggcgagtccgca

SEQ ID NO: 646 - DNA, 24 bp, Artificial sequence
  Primer
gtcggactcgccggcgagtccgac

SEQ ID NO: 647 - DNA, 24 bp, Artificial sequence
  Primer
ggtggactcgccggcgagtccacc

SEQ ID NO: 648 - DNA, 24 bp, Artificial sequence
  Primer
ggctgactcgccggcgagtcagcc

SEQ ID NO: 649 - DNA, 24 bp, Artificial sequence
  Primer
gcccgactcgccggcgagtcgggc

SEQ ID NO: 650 - DNA, 24 bp, Artificial sequence
  Primer
acccgactcgccggcgagtcgggt

SEQ ID NO: 651 - DNA, 24 bp, Artificial sequence
  Primer
gaccgactcgccggcgagtcggtc

SEQ ID NO: 652 - DNA, 24 bp, Artificial sequence
  Primer
gcacgactcgccggcgagtcgtgc

SEQ ID NO: 653 - DNA, 24 bp, Artificial sequence
  Primer
gccagactcgccggcgagtctggc

SEQ ID NO: 654 - DNA, 24 bp, Artificial sequence
  Primer
tcccgactcgccggcgagtcggga

SEQ ID NO: 655 - DNA, 24 bp, Artificial sequence
  Primer
gtccgactcgccggcgagtcggac

SEQ ID NO: 656 - DNA, 24 bp, Artificial sequence
  Primer
gcctgactcgccggcgagtcaggc

SEQ ID NO: 657 - DNA, 24 bp, Artificial sequence
  Primer
gggcgactcgccggcgagtcgccc

SEQ ID NO: 658 - DNA, 24 bp, Artificial sequence
  Primer
aggcgactcgccggcgagtcgcct

SEQ ID NO: 659 - DNA, 24 bp, Artificial sequence
  Primer
gagcgactcgccggcgagtcgctc

SEQ ID NO: 660 - DNA, 24 bp, Artificial sequence
  Primer
ggacgactcgccggcgagtcgtcc

SEQ ID NO: 661 - DNA, 24 bp, Artificial sequence
  Primer
gggagactcgccggcgagtctccc

SEQ ID NO: 662 - DNA, 24 bp, Artificial sequence
  Primer
tggcgactcgccggcgagtcgcca

SEQ ID NO: 663 - DNA, 24 bp, Artificial sequence
  Primer
gtgcgactcgccggcgagtcgcac

SEQ ID NO: 664 - DNA, 24 bp, Artificial sequence
  Primer
gggtgactcgccggcgagtcaccc

SEQ ID NO: 665 - DNA, 24 bp, Artificial sequence
  Primer
acgggactcgccggcgagtcccgt

SEQ ID NO: 666 - DNA, 24 bp, Artificial sequence
  Primer
cagggactcgccggcgagtccctg

SEQ ID NO: 667 - DNA, 24 bp, Artificial sequence
  Primer
ccaggactcgccggcgagtcctgg

SEQ ID NO: 668 - DNA, 24 bp, Artificial sequence
  Primer
ccgagactcgccggcgagtctcgg

SEQ ID NO: 669 - DNA, 24 bp, Artificial sequence
  Primer
tcgggactcgccggcgagtcccga

SEQ ID NO: 670 - DNA, 24 bp, Artificial sequence
  Primer
ctgggactcgccggcgagtcccag

SEQ ID NO: 671 - DNA, 24 bp, Artificial sequence
  Primer
cctggactcgccggcgagtccagg

SEQ ID NO: 672 - DNA, 24 bp, Artificial sequence
  Primer
ccgtgactcgccggcgagtcacgg

SEQ ID NO: 673 - DNA, 24 bp, Artificial sequence
  Primer
cggcgactcgccggcgagtcgccg

SEQ ID NO: 674 - DNA, 24 bp, Artificial sequence
  Primer
cagcgactcgccggcgagtcgctg

SEQ ID NO: 675 - DNA, 24 bp, Artificial sequence
  Primer
cgacgactcgccggcgagtcgtcg

SEQ ID NO: 676 - DNA, 24 bp, Artificial sequence
  Primer
cggagactcgccggcgagtctccg

SEQ ID NO: 677 - DNA, 24 bp, Artificial sequence
  Primer
ctgcgactcgccggcgagtcgcag

SEQ ID NO: 678 - DNA, 24 bp, Artificial sequence
  Primer
cggtgactcgccggcgagtcaccg

SEQ ID NO: 679 - DNA, 24 bp, Artificial sequence
  Primer
cacggactcgccggcgagtccgtg

SEQ ID NO: 680 - DNA, 24 bp, Artificial sequence
  Primer
cccagactcgccggcgagtctggg

SEQ ID NO: 681 - DNA, 24 bp, Artificial sequence
  Primer
ctcggactcgccggcgagtccgag

SEQ ID NO: 682 - DNA, 24 bp, Artificial sequence
  Primer
ccctgactcgccggcgagtcaggg

SEQ ID NO: 683 - DNA, 24 bp, Artificial sequence
  Primer
ccacgactcgccggcgagtcgtgg

SEQ ID NO: 684 - DNA, 24 bp, Artificial sequence
  Primer
agccgactcgccggcgagtcggct

SEQ ID NO: 685 - DNA, 24 bp, Artificial sequence
  Primer
tgccgactcgccggcgagtcggca

SEQ ID NO: 686 - DNA, 24 bp, Artificial sequence
  Primer
gcgagactcgccggcgagtctcgc

SEQ ID NO: 687 - DNA, 24 bp, Artificial sequence
  Primer
gcgtgactcgccggcgagtcacgc

SEQ ID NO: 688 - DNA, 24 bp, Artificial sequence
  Primer
gcaggactcgccggcgagtcctgc

SEQ ID NO: 689 - DNA, 24 bp, Artificial sequence
  Primer
gctggactcgccggcgagtccagc

SEQ ID NO: 690 - DNA, 24 bp, Artificial sequence
  Primer
cgaggactcgccggcgagtcctcg

SEQ ID NO: 691 - DNA, 24 bp, Artificial sequence
  Primer
cgtggactcgccggcgagtccacg

SEQ ID NO: 692 - DNA, 24 bp, Artificial sequence
  Primer
caccgactcgccggcgagtcggtg

SEQ ID NO: 693 - DNA, 24 bp, Artificial sequence
  Primer
ctccgactcgccggcgagtcggag

SEQ ID NO: 694 - DNA, 24 bp, Artificial sequence
  Primer
gcgggactcgccggcgagtcccgc

SEQ ID NO: 695 - DNA, 24 bp, Artificial sequence
  Primer
gagggactcgccggcgagtccctc

SEQ ID NO: 696 - DNA, 24 bp, Artificial sequence
  Primer
gtgggactcgccggcgagtcccac

SEQ ID NO: 697 - DNA, 24 bp, Artificial sequence
  Primer
  misc_feature (1)..(4): n is a, c, g, or t
  misc_feature (21)..(24): n is a, c, g, or t
nnnngactcacatgtgagtcnnnn

SEQ ID NO: 698 - DNA, 24 bp, Artificial sequence
  Primer
ggcggactcacatgtgagtccgcc

SEQ ID NO: 699 - DNA, 24 bp, Artificial sequence
  Primer
agcggactcacatgtgagtccgct

SEQ ID NO: 700 - DNA, 24 bp, Artificial sequence
  Primer
gacggactcacatgtgagtccgtc

SEQ ID NO: 701 - DNA, 24 bp, Artificial sequence
  Primer
ggaggactcacatgtgagtcctcc

SEQ ID NO: 702 - DNA, 24 bp, Artificial sequence
  Primer
ggcagactcacatgtgagtctgcc

SEQ ID NO: 703 - DNA, 24 bp, Artificial sequence
  Primer
tgcggactcacatgtgagtccgca

SEQ ID NO: 704 - DNA, 24 bp, Artificial sequence
  Primer
gtcggactcacatgtgagtccgac

SEQ ID NO: 705 - DNA, 24 bp, Artificial sequence
  Primer
ggtggactcacatgtgagtccacc

SEQ ID NO: 706 - DNA, 24 bp, Artificial sequence
  Primer
ggctgactcacatgtgagtcagcc

SEQ ID NO: 707 - DNA, 24 bp, Artificial sequence
  Primer
gcccgactcacatgtgagtcgggc

SEQ ID NO: 708 - DNA, 24 bp, Artificial sequence
  Primer
acccgactcacatgtgagtcgggt

SEQ ID NO: 709 - DNA, 24 bp, Artificial sequence
  Primer
gaccgactcacatgtgagtcggtc

SEQ ID NO: 710 - DNA, 24 bp, Artificial sequence
  Primer
gcacgactcacatgtgagtcgtgc

SEQ ID NO: 711 - DNA, 24 bp, Artificial sequence
  Primer
gccagactcacatgtgagtctggc

SEQ ID NO: 712 - DNA, 24 bp, Artificial sequence
  Primer
tcccgactcacatgtgagtcggga

SEQ ID NO: 713 - DNA, 24 bp, Artificial sequence
  Primer
gtccgactcacatgtgagtcggac

SEQ ID NO: 714 - DNA, 24 bp, Artificial sequence
  Primer
gcctgactcacatgtgagtcaggc

SEQ ID NO: 715 - DNA, 24 bp, Artificial sequence
  Primer
gggcgactcacatgtgagtcgccc

SEQ ID NO: 716 - DNA, 24 bp, Artificial sequence
  Primer
aggcgactcacatgtgagtcgcct

SEQ ID NO: 717 - DNA, 24 bp, Artificial sequence
  Primer
gagcgactcacatgtgagtcgctc

SEQ ID NO: 718 - DNA, 24 bp, Artificial sequence
  Primer
ggacgactcacatgtgagtcgtcc

SEQ ID NO: 719 - DNA, 24 bp, Artificial sequence
  Primer
gggagactcacatgtgagtctccc

SEQ ID NO: 720 - DNA, 24 bp, Artificial sequence
  Primer
tggcgactcacatgtgagtcgcca

SEQ ID NO: 721 - DNA, 24 bp, Artificial sequence
  Primer
gtgcgactcacatgtgagtcgcac

SEQ ID NO: 722 - DNA, 24 bp, Artificial sequence
  Primer
gggtgactcacatgtgagtcaccc

SEQ ID NO: 723 - DNA, 24 bp, Artificial sequence
  Primer
acgggactcacatgtgagtcccgt

SEQ ID NO: 724 - DNA, 24 bp, Artificial sequence
  Primer
cagggactcacatgtgagtccctg

SEQ ID NO: 725 - DNA, 24 bp, Artificial sequence
  Primer
ccaggactcacatgtgagtcctgg

SEQ ID NO: 726 - DNA, 24 bp, Artificial sequence
  Primer
ccgagactcacatgtgagtctcgg

SEQ ID NO: 727 - DNA, 24 bp, Artificial sequence
  Primer
tcgggactcacatgtgagtcccga

SEQ ID NO: 728 - DNA, 24 bp, Artificial sequence
  Primer
ctgggactcacatgtgagtcccag

SEQ ID NO: 729 - DNA, 24 bp, Artificial sequence
  Primer
cctggactcacatgtgagtccagg

SEQ ID NO: 730 - DNA, 24 bp, Artificial sequence
  Primer
ccgtgactcacatgtgagtcacgg

SEQ ID NO: 731 - DNA, 24 bp, Artificial sequence
  Primer
cggcgactcacatgtgagtcgccg

SEQ ID NO: 732 - DNA, 24 bp, Artificial sequence
  Primer
cagcgactcacatgtgagtcgctg

SEQ ID NO: 733 - DNA, 24 bp, Artificial sequence
  Primer
cgacgactcacatgtgagtcgtcg

SEQ ID NO: 734 - DNA, 24 bp, Artificial sequence
  Primer
cggagactcacatgtgagtctccg

SEQ ID NO: 735 - DNA, 24 bp, Artificial sequence
  Primer
ctgcgactcacatgtgagtcgcag

SEQ ID NO: 736 - DNA, 24 bp, Artificial sequence
  Primer
cggtgactcacatgtgagtcaccg

SEQ ID NO: 737 - DNA, 24 bp, Artificial sequence
  Primer
cacggactcacatgtgagtccgtg

SEQ ID NO: 738 - DNA, 24 bp, Artificial sequence
  Primer
cccagactcacatgtgagtctggg

SEQ ID NO: 739 - DNA, 24 bp, Artificial sequence
  Primer
ctcggactcacatgtgagtccgag

SEQ ID NO: 740 - DNA, 24 bp, Artificial sequence
  Primer
ccctgactcacatgtgagtcaggg

SEQ ID NO: 741 - DNA, 24 bp, Artificial sequence
  Primer
ccacgactcacatgtgagtcgtgg

SEQ ID NO: 742 - DNA, 24 bp, Artificial sequence
  Primer
agccgactcacatgtgagtcggct

SEQ ID NO: 743 - DNA, 24 bp, Artificial sequence
  Primer
tgccgactcacatgtgagtcggca

SEQ ID NO: 744 - DNA, 24 bp, Artificial sequence
  Primer
gcgagactcacatgtgagtctcgc

SEQ ID NO: 745 - DNA, 24 bp, Artificial sequence
  Primer
gcgtgactcacatgtgagtcacgc

SEQ ID NO: 746 - DNA, 24 bp, Artificial sequence
  Primer
gcaggactcacatgtgagtcctgc

SEQ ID NO: 747 - DNA, 24 bp, Artificial sequence
  Primer
gctggactcacatgtgagtccagc

SEQ ID NO: 748 - DNA, 24 bp, Artificial sequence
  Primer
cgaggactcacatgtgagtcctcg

SEQ ID NO: 749 - DNA, 24 bp, Artificial sequence
  Primer
cgtggactcacatgtgagtccacg

SEQ ID NO: 750 - DNA, 24 bp, Artificial sequence
  Primer
caccgactcacatgtgagtcggtg

SEQ ID NO: 751 - DNA, 24 bp, Artificial sequence
  Primer
ctccgactcacatgtgagtcggag

SEQ ID NO: 752 - DNA, 24 bp, Artificial sequence
  Primer
gcgggactcacatgtgagtcccgc

SEQ ID NO: 753 - DNA, 24 bp, Artificial sequence
  Primer
gagggactcacatgtgagtccctc

SEQ ID NO: 754 - DNA, 24 bp, Artificial sequence
  Primer
gtgggactcacatgtgagtcccac

SEQ ID NO: 755 - DNA, 24 bp, Artificial sequence
  Primer
  misc_feature (1)..(4): n is a, c, g, or t
  misc_feature (21)..(24): n is a, c, g, or t
nnnngactcactagtgagtcnnnn

SEQ ID NO: 756 - DNA, 24 bp, Artificial sequence
  Primer
ggcggactcactagtgagtccgcc

SEQ ID NO: 757 - DNA, 24 bp, Artificial sequence
  Primer
agcggactcactagtgagtccgct

SEQ ID NO: 758 - DNA, 24 bp, Artificial sequence
  Primer
gacggactcactagtgagtccgtc

SEQ ID NO: 759 - DNA, 24 bp, Artificial sequence
  Primer
ggaggactcactagtgagtcctcc

SEQ ID NO: 760 - DNA, 24 bp, Artificial sequence
  Primer
ggcagactcactagtgagtctgcc

SEQ ID NO: 761 - DNA, 24 bp, Artificial sequence
  Primer
tgcggactcactagtgagtccgca

SEQ ID NO: 762 - DNA, 24 bp, Artificial sequence
  Primer
gtcggactcactagtgagtccgac

SEQ ID NO: 763 - DNA, 24 bp, Artificial sequence
  Primer
ggtggactcactagtgagtccacc

SEQ ID NO: 764 - DNA, 24 bp, Artificial sequence
  Primer
ggctgactcactagtgagtcagcc

SEQ ID NO: 765 - DNA, 24 bp, Artificial sequence
  Primer
gcccgactcactagtgagtcgggc

SEQ ID NO: 766 - DNA, 24 bp, Artificial sequence
  Primer
acccgactcactagtgagtcgggt

SEQ ID NO: 767 - DNA, 24 bp, Artificial sequence
  Primer
gaccgactcactagtgagtcggtc

SEQ ID NO: 768 - DNA, 24 bp, Artificial sequence
  Primer
gcacgactcactagtgagtcgtgc

SEQ ID NO: 769 - DNA, 24 bp, Artificial sequence
  Primer
gccagactcactagtgagtctggc

SEQ ID NO: 770 - DNA, 24 bp, Artificial sequence
  Primer
tcccgactcactagtgagtcggga

SEQ ID NO: 771 - DNA, 24 bp, Artificial sequence
  Primer
gtccgactcactagtgagtcggac

SEQ ID NO: 772 - DNA, 24 bp, Artificial sequence
  Primer
gcctgactcactagtgagtcaggc

SEQ ID NO: 773 - DNA, 24 bp, Artificial sequence
  Primer
gggcgactcactagtgagtcgccc

SEQ ID NO: 774 - DNA, 24 bp, Artificial sequence
  Primer
aggcgactcactagtgagtcgcct

SEQ ID NO: 775 - DNA, 24 bp, Artificial sequence
  Primer
gagcgactcactagtgagtcgctc

SEQ ID NO: 776 - DNA, 24 bp, Artificial sequence
  Primer
ggacgactcactagtgagtcgtcc

SEQ ID NO: 777 - DNA, 24 bp, Artificial sequence
  Primer
gggagactcactagtgagtctccc

SEQ ID NO: 778 - DNA, 24 bp, Artificial sequence
  Primer
tggcgactcactagtgagtcgcca

SEQ ID NO: 779 - DNA, 24 bp, Artificial sequence
  Primer
gtgcgactcactagtgagtcgcac

SEQ ID NO: 780 - DNA, 24 bp, Artificial sequence
  Primer
gggtgactcactagtgagtcaccc

SEQ ID NO: 781 - DNA, 24 bp, Artificial sequence
  Primer
acgggactcactagtgagtcccgt

SEQ ID NO: 782 - DNA, 24 bp, Artificial sequence
  Primer
cagggactcactagtgagtccctg

SEQ ID NO: 783 - DNA, 24 bp, Artificial sequence
  Primer
ccaggactcactagtgagtcctgg

SEQ ID NO: 784 - DNA, 24 bp, Artificial sequence
  Primer
ccgagactcactagtgagtctcgg

SEQ ID NO: 785 - DNA, 24 bp, Artificial sequence
  Primer
tcgggactcactagtgagtcccga

SEQ ID NO: 786 - DNA, 24 bp, Artificial sequence
  Primer
ctgggactcactagtgagtcccag

SEQ ID NO: 787 - DNA, 24 bp, Artificial sequence
  Primer
cctggactcactagtgagtccagg

SEQ ID NO: 788 - DNA, 24 bp, Artificial sequence
  Primer
ccgtgactcactagtgagtcacgg

SEQ ID NO: 789 - DNA, 24 bp, Artificial sequence
  Primer
cggcgactcactagtgagtcgccg

SEQ ID NO: 790 - DNA, 24 bp, Artificial sequence
  Primer
cagcgactcactagtgagtcgctg

SEQ ID NO: 791 - DNA, 24 bp, Artificial sequence
  Primer
cgacgactcactagtgagtcgtcg

SEQ ID NO: 792 - DNA, 24 bp, Artificial sequence
  Primer
cggagactcactagtgagtctccg

SEQ ID NO: 793 - DNA, 24 bp, Artificial sequence
  Primer
ctgcgactcactagtgagtcgcag

SEQ ID NO: 794 - DNA, 24 bp, Artificial sequence
  Primer
cggtgactcactagtgagtcaccg

SEQ ID NO: 795 - DNA, 24 bp, Artificial sequence
  Primer
cacggactcactagtgagtccgtg

SEQ ID NO: 796 - DNA, 24 bp, Artificial sequence
  Primer
cccagactcactagtgagtctggg

SEQ ID NO: 797 - DNA, 24 bp, Artificial sequence
  Primer
ctcggactcactagtgagtccgag

SEQ ID NO: 798 - DNA, 24 bp, Artificial sequence
  Primer
ccctgactcactagtgagtcaggg

SEQ ID NO: 799 - DNA, 24 bp, Artificial sequence
  Primer
ccacgactcactagtgagtcgtgg

SEQ ID NO: 800 - DNA, 24 bp, Artificial sequence
  Primer
agccgactcactagtgagtcggct

SEQ ID NO: 801 - DNA, 24 bp, Artificial sequence
  Primer
tgccgactcactagtgagtcggca

SEQ ID NO: 802 - DNA, 24 bp, Artificial sequence
  Primer
gcgagactcactagtgagtctcgc

SEQ ID NO: 803 - DNA, 24 bp, Artificial sequence
  Primer
gcgtgactcactagtgagtcacgc

SEQ ID NO: 804 - DNA, 24 bp, Artificial sequence
  Primer
gcaggactcactagtgagtcctgc

SEQ ID NO: 805 - DNA, 24 bp, Artificial sequence
  Primer
gctggactcactagtgagtccagc

SEQ ID NO: 806 - DNA, 24 bp, Artificial sequence
  Primer
cgaggactcactagtgagtcctcg

SEQ ID NO: 807 - DNA, 24 bp, Artificial sequence
  Primer
cgtggactcactagtgagtccacg

SEQ ID NO: 808 - DNA, 24 bp, Artificial sequence
  Primer
caccgactcactagtgagtcggtg

SEQ ID NO: 809 - DNA, 24 bp, Artificial sequence
  Primer
ctccgactcactagtgagtcggag

SEQ ID NO: 810 - DNA, 24 bp, Artificial sequence
  Primer
gcgggactcactagtgagtcccgc

SEQ ID NO: 811 - DNA, 24 bp, Artificial sequence
  Primer
gagggactcactagtgagtccctc

SEQ ID NO: 812 - DNA, 24 bp, Artificial sequence
  Primer
gtgggactcactagtgagtcccac

SEQ ID NO: 813 - DNA, 24 bp, Artificial sequence
  Primer
  misc_feature (1)..(4): n is a, c, g, or t
  misc_feature (21)..(24): n is a, c, g, or t
nnnngactcacgcgtgagtcnnnn

SEQ ID NO: 814 - DNA, 24 bp, Artificial sequence
  Primer
ggcggactcacgcgtgagtccgcc

SEQ ID NO: 815 - DNA, 24 bp, Artificial sequence
  Primer
agcggactcacgcgtgagtccgct

SEQ ID NO: 816 - DNA, 24 bp, Artificial sequence
  Primer
gacggactcacgcgtgagtccgtc

SEQ ID NO: 817 - DNA, 24 bp, Artificial sequence
  Primer
ggaggactcacgcgtgagtcctcc

SEQ ID NO: 818 - DNA, 24 bp, Artificial sequence
  Primer
ggcagactcacgcgtgagtctgcc

SEQ ID NO: 819 - DNA, 24 bp, Artificial sequence
  Primer
tgcggactcacgcgtgagtccgca

SEQ ID NO: 820 - DNA, 24 bp, Artificial sequence
  Primer
gtcggactcacgcgtgagtccgac

SEQ ID NO: 821 - DNA, 24 bp, Artificial sequence
  Primer
ggtggactcacgcgtgagtccacc

SEQ ID NO: 822 - DNA, 24 bp, Artificial sequence
  Primer
ggctgactcacgcgtgagtcagcc

SEQ ID NO: 823 - DNA, 24 bp, Artificial sequence
  Primer
gcccgactcacgcgtgagtcgggc

SEQ ID NO: 824 - DNA, 24 bp, Artificial sequence
  Primer
acccgactcacgcgtgagtcgggt

SEQ ID NO: 825 - DNA, 24 bp, Artificial sequence
  Primer
gaccgactcacgcgtgagtcggtc

SEQ ID NO: 826 - DNA, 24 bp, Artificial sequence
  Primer
gcacgactcacgcgtgagtcgtgc

SEQ ID NO: 827 - DNA, 24 bp, Artificial sequence
  Primer
gccagactcacgcgtgagtctggc

SEQ ID NO: 828 - DNA, 24 bp, Artificial sequence
  Primer
tcccgactcacgcgtgagtcggga

SEQ ID NO: 829 - DNA, 24 bp, Artificial sequence
  Primer
gtccgactcacgcgtgagtcggac

SEQ ID NO: 830 - DNA, 24 bp, Artificial sequence
  Primer
gcctgactcacgcgtgagtcaggc

SEQ ID NO: 831 - DNA, 24 bp, Artificial sequence
  Primer
gggcgactcacgcgtgagtcgccc

SEQ ID NO: 832 - DNA, 24 bp, Artificial sequence
  Primer
aggcgactcacgcgtgagtcgcct

SEQ ID NO: 833 - DNA, 24 bp, Artificial sequence
  Primer
gagcgactcacgcgtgagtcgctc

SEQ ID NO: 834 - DNA, 24 bp, Artificial sequence
  Primer
ggacgactcacgcgtgagtcgtcc

SEQ ID NO: 835 - DNA, 24 bp, Artificial sequence
  Primer
gggagactcacgcgtgagtctccc

SEQ ID NO: 836 - DNA, 24 bp, Artificial sequence
  Primer
tggcgactcacgcgtgagtcgcca

SEQ ID NO: 837 - DNA, 24 bp, Artificial sequence
  Primer
gtgcgactcacgcgtgagtcgcac

SEQ ID NO: 838 - DNA, 24 bp, Artificial sequence
  Primer
gggtgactcacgcgtgagtcaccc

SEQ ID NO: 839 - DNA, 24 bp, Artificial sequence
  Primer
acgggactcacgcgtgagtcccgt

SEQ ID NO: 840 - DNA, 24 bp, Artificial sequence
  Primer
cagggactcacgcgtgagtccctg

SEQ ID NO: 841 - DNA, 24 bp, Artificial sequence
  Primer
ccaggactcacgcgtgagtcctgg

SEQ ID NO: 842 - DNA, 24 bp, Artificial sequence
  Primer
ccgagactcacgcgtgagtctcgg

SEQ ID NO: 843 - DNA, 24 bp, Artificial sequence
  Primer
tcgggactcacgcgtgagtcccga

SEQ ID NO: 844 - DNA, 24 bp, Artificial sequence
  Primer
ctgggactcacgcgtgagtcccag

SEQ ID NO: 845 - DNA, 24 bp, Artificial sequence
  Primer
cctggactcacgcgtgagtccagg

SEQ ID NO: 846 - DNA, 24 bp, Artificial sequence
  Primer
ccgtgactcacgcgtgagtcacgg

SEQ ID NO: 847 - DNA, 24 bp, Artificial sequence
  Primer
cggcgactcacgcgtgagtcgccg

SEQ ID NO: 848 - DNA, 24 bp, Artificial sequence
  Primer
cagcgactcacgcgtgagtcgctg

SEQ ID NO: 849 - DNA, 24 bp, Artificial sequence
  Primer
cgacgactcacgcgtgagtcgtcg

SEQ ID NO: 850 - DNA, 24 bp, Artificial sequence
  Primer
cggagactcacgcgtgagtctccg

SEQ ID NO: 851 - DNA, 24 bp, Artificial sequence
  Primer
ctgcgactcacgcgtgagtcgcag

SEQ ID NO: 852 - DNA, 24 bp, Artificial sequence
  Primer
cggtgactcacgcgtgagtcaccg

SEQ ID NO: 853 - DNA, 24 bp, Artificial sequence
  Primer
cacggactcacgcgtgagtccgtg

SEQ ID NO: 854 - DNA, 24 bp, Artificial sequence
  Primer
cccagactcacgcgtgagtctggg

SEQ ID NO: 855 - DNA, 24 bp, Artificial sequence
  Primer
ctcggactcacgcgtgagtccgag

SEQ ID NO: 856 - DNA, 24 bp, Artificial sequence
  Primer
ccctgactcacgcgtgagtcaggg

SEQ ID NO: 857 - DNA, 24 bp, Artificial sequence
  Primer
ccacgactcacgcgtgagtcgtgg

SEQ ID NO: 858 - DNA, 24 bp, Artificial sequence
  Primer
agccgactcacgcgtgagtcggct

SEQ ID NO: 859 - DNA, 24 bp, Artificial sequence
  Primer
tgccgactcacgcgtgagtcggca

SEQ ID NO: 860 - DNA, 24 bp, Artificial sequence
  Primer
gcgagactcacgcgtgagtctcgc

SEQ ID NO: 861 - DNA, 24 bp, Artificial sequence
  Primer
gcgtgactcacgcgtgagtcacgc

SEQ ID NO: 862 - DNA, 24 bp, Artificial sequence
  Primer
gcaggactcacgcgtgagtcctgc

SEQ ID NO: 863 - DNA, 24 bp, Artificial sequence
  Primer
gctggactcacgcgtgagtccagc

SEQ ID NO: 864 - DNA, 24 bp, Artificial sequence
  Primer
cgaggactcacgcgtgagtcctcg

SEQ ID NO: 865 - DNA, 24 bp, Artificial sequence
  Primer
cgtggactcacgcgtgagtccacg

SEQ ID NO: 866 - DNA, 24 bp, Artificial sequence
  Primer
caccgactcacgcgtgagtcggtg

SEQ ID NO: 867 - DNA, 24 bp, Artificial sequence
  Primer
ctccgactcacgcgtgagtcggag

SEQ ID NO: 868 - DNA, 24 bp, Artificial sequence
  Primer
gcgggactcacgcgtgagtcccgc

SEQ ID NO: 869 - DNA, 24 bp, Artificial sequence
  Primer
gagggactcacgcgtgagtccctc

SEQ ID NO: 870 - DNA, 24 bp, Artificial sequence
  Primer
gtgggactcacgcgtgagtcccac

SEQ ID NO: 871 - DNA, 24 bp, Artificial sequence
  Primer
  misc_feature (1)..(4): n is a, c, g, or t
  misc_feature (21)..(24): n is a, c, g, or t
nnnngactcaccggtgagtcnnnn

SEQ ID NO: 872 - DNA, 24 bp, Artificial sequence
  Primer
ggcggactcaccggtgagtccgcc

SEQ ID NO: 873 - DNA, 24 bp, Artificial sequence
  Primer
agcggactcaccggtgagtccgct

SEQ ID NO: 874 - DNA, 24 bp, Artificial sequence
  Primer
gacggactcaccggtgagtccgtc

SEQ ID NO: 875 - DNA, 24 bp, Artificial sequence
  Primer
ggaggactcaccggtgagtcctcc

SEQ ID NO: 876 - DNA, 24 bp, Artificial sequence
  Primer
ggcagactcaccggtgagtctgcc

SEQ ID NO: 877 - DNA, 24 bp, Artificial sequence
  Primer
tgcggactcaccggtgagtccgca

SEQ ID NO: 878 - DNA, 24 bp, Artificial sequence
  Primer
gtcggactcaccggtgagtccgac

SEQ ID NO: 879 - DNA, 24 bp, Artificial sequence
  Primer
ggtggactcaccggtgagtccacc

SEQ ID NO: 880 - DNA, 24 bp, Artificial sequence
  Primer
ggctgactcaccggtgagtcagcc

SEQ ID NO: 881 - DNA, 24 bp, Artificial sequence
  Primer
gcccgactcaccggtgagtcgggc

SEQ ID NO: 882 - DNA, 24 bp, Artificial sequence
  Primer
acccgactcaccggtgagtcgggt

SEQ ID NO: 883 - DNA, 24 bp, Artificial sequence
  Primer
gaccgactcaccggtgagtcggtc

SEQ ID NO: 884 - DNA, 24 bp, Artificial sequence
  Primer
gcacgactcaccggtgagtcgtgc

SEQ ID NO: 885 - DNA, 24 bp, Artificial sequence
  Primer
gccagactcaccggtgagtctggc

SEQ ID NO: 886 - DNA, 24 bp, Artificial sequence
  Primer
tcccgactcaccggtgagtcggga

SEQ ID NO: 887 - DNA, 24 bp, Artificial sequence
  Primer
gtccgactcaccggtgagtcggac

SEQ ID NO: 888 - DNA, 24 bp, Artificial sequence
  Primer
gcctgactcaccggtgagtcaggc

SEQ ID NO: 889 - DNA, 24 bp, Artificial sequence
  Primer
gggcgactcaccggtgagtcgccc

SEQ ID NO: 890 - DNA, 24 bp, Artificial sequence
  Primer
aggcgactcaccggtgagtcgcct

SEQ ID NO: 891 - DNA, 24 bp, Artificial sequence
  Primer
gagcgactcaccggtgagtcgctc

SEQ ID NO: 892 - DNA, 24 bp, Artificial sequence
  Primer
ggacgactcaccggtgagtcgtcc

SEQ ID NO: 893 - DNA, 24 bp, Artificial sequence
  Primer
gggagactcaccggtgagtctccc

SEQ ID NO: 894 - DNA, 24 bp, Artificial sequence
  Primer
tggcgactcaccggtgagtcgcca

SEQ ID NO: 895 - DNA, 24 bp, Artificial sequence
  Primer
gtgcgactcaccggtgagtcgcac

SEQ ID NO: 896 - DNA, 24 bp, Artificial sequence
  Primer
gggtgactcaccggtgagtcaccc

SEQ ID NO: 897 - DNA, 24 bp, Artificial sequence
  Primer
acgggactcaccggtgagtcccgt

SEQ ID NO: 898 - DNA, 24 bp, Artificial sequence
  Primer
cagggactcaccggtgagtccctg

SEQ ID NO: 899 - DNA, 24 bp, Artificial sequence
  Primer
ccaggactcaccggtgagtcctgg

SEQ ID NO: 900 - DNA, 24 bp, Artificial sequence
  Primer
ccgagactcaccggtgagtctcgg

SEQ ID NO: 901 - DNA, 24 bp, Artificial sequence
  Primer
tcgggactcaccggtgagtcccga

SEQ ID NO: 902 - DNA, 24 bp, Artificial sequence
  Primer
ctgggactcaccggtgagtcccag

SEQ ID NO: 903 - DNA, 24 bp, Artificial sequence
  Primer
cctggactcaccggtgagtccagg

SEQ ID NO: 904 - DNA, 24 bp, Artificial sequence
  Primer
ccgtgactcaccggtgagtcacgg

SEQ ID NO: 905 - DNA, 24 bp, Artificial sequence
  Primer
cggcgactcaccggtgagtcgccg

SEQ ID NO: 906 - DNA, 24 bp, Artificial sequence
  Primer
cagcgactcaccggtgagtcgctg

SEQ ID NO: 907 - DNA, 24 bp, Artificial sequence
  Primer
cgacgactcaccggtgagtcgtcg

SEQ ID NO: 908 - DNA, 24 bp, Artificial sequence
  Primer
cggagactcaccggtgagtctccg

SEQ ID NO: 909 - DNA, 24 bp, Artificial sequence
  Primer
ctgcgactcaccggtgagtcgcag

SEQ ID NO: 910 - DNA, 24 bp, Artificial sequence
  Primer
cggtgactcaccggtgagtcaccg

SEQ ID NO: 911 - DNA, 24 bp, Artificial sequence
  Primer
cacggactcaccggtgagtccgtg

SEQ ID NO: 912 - DNA, 24 bp, Artificial sequence
  Primer
cccagactcaccggtgagtctggg

SEQ ID NO: 913 - DNA, 24 bp, Artificial sequence
  Primer
ctcggactcaccggtgagtccgag

SEQ ID NO: 914 - DNA, 24 bp, Artificial sequence
  Primer
ccctgactcaccggtgagtcaggg

SEQ ID NO: 915 - DNA, 24 bp, Artificial sequence
  Primer
ccacgactcaccggtgagtcgtgg

SEQ ID NO: 916 - DNA, 24 bp, Artificial sequence
  Primer
agccgactcaccggtgagtcggct

SEQ ID NO: 917 - DNA, 24 bp, Artificial sequence
  Primer
tgccgactcaccggtgagtcggca

SEQ ID NO: 918 - DNA, 24 bp, Artificial sequence
  Primer
gcgagactcaccggtgagtctcgc

SEQ ID NO: 919 - DNA, 24 bp, Artificial sequence
  Primer
gcgtgactcaccggtgagtcacgc

SEQ ID NO: 920 - DNA, 24 bp, Artificial sequence
  Primer
gcaggactcaccggtgagtcctgc

SEQ ID NO: 921 - DNA, 24 bp, Artificial sequence
  Primer
gctggactcaccggtgagtccagc

SEQ ID NO: 922 - DNA, 24 bp, Artificial sequence
  Primer
cgaggactcaccggtgagtcctcg

SEQ ID NO: 923 - DNA, 24 bp, Artificial sequence
  Primer
cgtggactcaccggtgagtccacg

SEQ ID NO: 924 - DNA, 24 bp, Artificial sequence
  Primer
caccgactcaccggtgagtcggtg

SEQ ID NO: 925 - DNA, 24 bp, Artificial sequence
  Primer
ctccgactcaccggtgagtcggag

SEQ ID NO: 926 - DNA, 24 bp, Artificial sequence
  Primer
gcgggactcaccggtgagtcccgc

SEQ ID NO: 927 - DNA, 24 bp, Artificial sequence
  Primer
gagggactcaccggtgagtccctc

SEQ ID NO: 928 - DNA, 24 bp, Artificial sequence
  Primer
gtgggactcaccggtgagtcccac

SEQ ID NO: 929 - DNA, 24 bp, Artificial sequence
  Primer
  misc_feature (1)..(4): n is a, c, g, or t
  misc_feature (21)..(24): n is a, c, g, or t
nnnngactcccatgggagtcnnnn

SEQ ID NO: 930 - DNA, 24 bp, Artificial sequence
  Primer
ggcggactcccatgggagtccgcc

SEQ ID NO: 931 - DNA, 24 bp, Artificial sequence
  Primer
agcggactcccatgggagtccgct

SEQ ID NO: 932 - DNA, 24 bp, Artificial sequence
  Primer
gacggactcccatgggagtccgtc

SEQ ID NO: 933 - DNA, 24 bp, Artificial sequence
  Primer
ggaggactcccatgggagtcctcc

SEQ ID NO: 934 - DNA, 24 bp, Artificial sequence
  Primer
ggcagactcccatgggagtctgcc

SEQ ID NO: 935 - DNA, 24 bp, Artificial sequence
  Primer
tgcggactcccatgggagtccgca

SEQ ID NO: 936 - DNA, 24 bp, Artificial sequence
  Primer
gtcggactcccatgggagtccgac

SEQ ID NO: 937 - DNA, 24 bp, Artificial sequence
  Primer
ggtggactcccatgggagtccacc

SEQ ID NO: 938 - DNA, 24 bp, Artificial sequence
  Primer
ggctgactcccatgggagtcagcc

SEQ ID NO: 939 - DNA, 24 bp, Artificial sequence
  Primer
gcccgactcccatgggagtcgggc

SEQ ID NO: 940 - DNA, 24 bp, Artificial sequence
  Primer
acccgactcccatgggagtcgggt

SEQ ID NO: 941 - DNA, 24 bp, Artificial sequence
  Primer
gaccgactcccatgggagtcggtc

SEQ ID NO: 942 - DNA, 24 bp, Artificial sequence
  Primer
gcacgactcccatgggagtcgtgc

SEQ ID NO: 943 - DNA, 24 bp, Artificial sequence
  Primer
gccagactcccatgggagtctggc

SEQ ID NO: 944 - DNA, 24 bp, Artificial sequence
  Primer
tcccgactcccatgggagtcggga

SEQ ID NO: 945 - DNA, 24 bp, Artificial sequence
  Primer
gtccgactcccatgggagtcggac

SEQ ID NO: 946 - DNA, 24 bp, Artificial sequence
  Primer
gcctgactcccatgggagtcaggc

SEQ ID NO: 947 - DNA, 24 bp, Artificial sequence
  Primer
gggcgactcccatgggagtcgccc

SEQ ID NO: 948 - DNA, 24 bp, Artificial sequence
  Primer
aggcgactcccatgggagtcgcct

SEQ ID NO: 949 - DNA, 24 bp, Artificial sequence
  Primer
gagcgactcccatgggagtcgctc

SEQ ID NO: 950 - DNA, 24 bp, Artificial sequence
  Primer
ggacgactcccatgggagtcgtcc

SEQ ID NO: 951 - DNA, 24 bp, Artificial sequence
  Primer
gggagactcccatgggagtctccc

SEQ ID NO: 952 - DNA, 24 bp, Artificial sequence
  Primer
tggcgactcccatgggagtcgcca

SEQ ID NO: 953 - DNA, 24 bp, Artificial sequence
  Primer
gtgcgactcccatgggagtcgcac

SEQ ID NO: 954 - DNA, 24 bp, Artificial sequence
  Primer
gggtgactcccatgggagtcaccc

SEQ ID NO: 955 - DNA, 24 bp, Artificial sequence
  Primer
acgggactcccatgggagtcccgt

SEQ ID NO: 956 - DNA, 24 bp, Artificial sequence
  Primer
cagggactcccatgggagtccctg

SEQ ID NO: 957 - DNA, 24 bp, Artificial sequence
  Primer
ccaggactcccatgggagtcctgg

SEQ ID NO: 958 - DNA, 24 bp, Artificial sequence
  Primer
ccgagactcccatgggagtctcgg

SEQ ID NO: 959 - DNA, 24 bp, Artificial sequence
  Primer
tcgggactcccatgggagtcccga

SEQ ID NO: 960 - DNA, 24 bp, Artificial sequence
  Primer
ctgggactcccatgggagtcccag

SEQ ID NO: 961 - DNA, 24 bp, Artificial sequence
  Primer
cctggactcccatgggagtccagg

SEQ ID NO: 962 - DNA, 24 bp, Artificial sequence
  Primer
ccgtgactcccatgggagtcacgg

SEQ ID NO: 963 - DNA, 24 bp, Artificial sequence
  Primer
cggcgactcccatgggagtcgccg

SEQ ID NO: 964 - DNA, 24 bp, Artificial sequence
  Primer
cagcgactcccatgggagtcgctg

SEQ ID NO: 965 - DNA, 24 bp, Artificial sequence
  Primer
cgacgactcccatgggagtcgtcg

SEQ ID NO: 966 - DNA, 24 bp, Artificial sequence
  Primer
cggagactcccatgggagtctccg

SEQ ID NO: 967 - DNA, 24 bp, Artificial sequence
  Primer
ctgcgactcccatgggagtcgcag

SEQ ID NO: 968 - DNA, 24 bp, Artificial sequence
  Primer
cggtgactcccatgggagtcaccg

SEQ ID NO: 969 - DNA, 24 bp, Artificial sequence
  Primer
cacggactcccatgggagtccgtg

SEQ ID NO: 970 - DNA, 24 bp, Artificial sequence
  Primer
cccagactcccatgggagtctggg

SEQ ID NO: 971 - DNA, 24 bp, Artificial sequence
  Primer
ctcggactcccatgggagtccgag

SEQ ID NO: 972 - DNA, 24 bp, Artificial sequence
  Primer
ccctgactcccatgggagtcaggg

SEQ ID NO: 973 - DNA, 24 bp, Artificial sequence
  Primer
ccacgactcccatgggagtcgtgg

SEQ ID NO: 974 - DNA, 24 bp, Artificial sequence
  Primer
agccgactcccatgggagtcggct

SEQ ID NO: 975 - DNA, 24 bp, Artificial sequence
  Primer
tgccgactcccatgggagtcggca

SEQ ID NO: 976 - DNA, 24 bp, Artificial sequence
  Primer
gcgagactcccatgggagtctcgc

SEQ ID NO: 977 - DNA, 24 bp, Artificial sequence
  Primer
gcgtgactcccatgggagtcacgc

SEQ ID NO: 978 - DNA, 24 bp, Artificial sequence
  Primer
gcaggactcccatgggagtcctgc

SEQ ID NO: 979 - DNA, 24 bp, Artificial sequence
  Primer
gctggactcccatgggagtccagc

SEQ ID NO: 980 - DNA, 24 bp, Artificial sequence
  Primer
cgaggactcccatgggagtcctcg

SEQ ID NO: 981 - DNA, 24 bp, Artificial sequence
  Primer
cgtggactcccatgggagtccacg

SEQ ID NO: 982 - DNA, 24 bp, Artificial sequence
  Primer
caccgactcccatgggagtcggtg

SEQ ID NO: 983 - DNA, 24 bp, Artificial sequence
  Primer
ctccgactcccatgggagtcggag

SEQ ID NO: 984 - DNA, 24 bp, Artificial sequence
  Primer
gcgggactcccatgggagtcccgc

SEQ ID NO: 985 - DNA, 24 bp, Artificial sequence
  Primer
gagggactcccatgggagtccctc

SEQ ID NO: 986 - DNA, 24 bp, Artificial sequence
  Primer
gtgggactcccatgggagtcccac

SEQ ID NO: 987 - DNA, 24 bp, Artificial sequence
  Primer
  misc_feature (1)..(4): n is a, c, g, or t
  misc_feature (21)..(24): n is a, c, g, or t
nnnngactccctagggagtcnnnn

SEQ ID NO: 988 - DNA, 24 bp, Artificial sequence
  Primer
ggcggactccctagggagtccgcc

SEQ ID NO: 989 - DNA, 24 bp, Artificial sequence
  Primer
agcggactccctagggagtccgct

SEQ ID NO: 990 - DNA, 24 bp, Artificial sequence
  Primer
gacggactccctagggagtccgtc

SEQ ID NO: 991 - DNA, 24 bp, Artificial sequence
  Primer
ggaggactccctagggagtcctcc

SEQ ID NO: 992 - DNA, 24 bp, Artificial sequence
  Primer
ggcagactccctagggagtctgcc

SEQ ID NO: 993 - DNA, 24 bp, Artificial sequence
  Primer
tgcggactccctagggagtccgca

SEQ ID NO: 994 - DNA, 24 bp, Artificial sequence
  Primer
gtcggactccctagggagtccgac

SEQ ID NO: 995 - DNA, 24 bp, Artificial sequence
  Primer
ggtggactccctagggagtccacc

SEQ ID NO: 996 - DNA, 24 bp, Artificial sequence
  Primer
ggctgactccctagggagtcagcc

SEQ ID NO: 997 - DNA, 24 bp, Artificial sequence
  Primer
gcccgactccctagggagtcgggc

SEQ ID NO: 998 - DNA, 24 bp, Artificial sequence
  Primer
acccgactccctagggagtcgggt

SEQ ID NO: 999 - DNA, 24 bp, Artificial sequence
  Primer
gaccgactccctagggagtcggtc

SEQ ID NO: 1000 - DNA, 24 bp, Artificial sequence
  Primer
gcacgactccctagggagtcgtgc

SEQ ID NO: 1001 - DNA, 24 bp, Artificial sequence
  Primer
gccagactccctagggagtctggc

SEQ ID NO: 1002 - DNA, 24 bp, Artificial sequence
  Primer
tcccgactccctagggagtcggga

SEQ ID NO: 1003 - DNA, 24 bp, Artificial sequence
  Primer
gtccgactccctagggagtcggac

SEQ ID NO: 1004 - DNA, 24 bp, Artificial sequence
  Primer
gcctgactccctagggagtcaggc

SEQ ID NO: 1005 - DNA, 24 bp, Artificial sequence
  Primer
gggcgactccctagggagtcgccc

SEQ ID NO: 1006 - DNA, 24 bp, Artificial sequence
  Primer
aggcgactccctagggagtcgcct

SEQ ID NO: 1007 - DNA, 24 bp, Artificial sequence
  Primer
gagcgactccctagggagtcgctc

SEQ ID NO: 1008 - DNA, 24 bp, Artificial sequence
  Primer
ggacgactccctagggagtcgtcc

SEQ ID NO: 1009 - DNA, 24 bp, Artificial sequence
  Primer
gggagactccctagggagtctccc

SEQ ID NO: 1010 - DNA, 24 bp, Artificial sequence
  Primer
tggcgactccctagggagtcgcca

SEQ ID NO: 1011 - DNA, 24 bp, Artificial sequence
  Primer
gtgcgactccctagggagtcgcac

SEQ ID NO: 1012 - DNA, 24 bp, Artificial sequence
  Primer
gggtgactccctagggagtcaccc

SEQ ID NO: 1013 - DNA, 24 bp, Artificial sequence
  Primer
acgggactccctagggagtcccgt

SEQ ID NO: 1014 - DNA, 24 bp, Artificial sequence
  Primer
cagggactccctagggagtccctg

SEQ ID NO: 1015 - DNA, 24 bp, Artificial sequence
  Primer
ccaggactccctagggagtcctgg

SEQ ID NO: 1016 - DNA, 24 bp, Artificial sequence
  Primer
ccgagactccctagggagtctcgg

SEQ ID NO: 1017 - DNA, 24 bp, Artificial sequence
  Primer
tcgggactccctagggagtcccga

SEQ ID NO: 1018 - DNA, 24 bp, Artificial sequence
  Primer
ctgggactccctagggagtcccag

SEQ ID NO: 1019 - DNA, 24 bp, Artificial sequence
  Primer
cctggactccctagggagtccagg

SEQ ID NO: 1020 - DNA, 24 bp, Artificial sequence
  Primer
ccgtgactccctagggagtcacgg

SEQ ID NO: 1021 - DNA, 24 bp, Artificial sequence
  Primer
cggcgactccctagggagtcgccg

SEQ ID NO: 1022 - DNA, 24 bp, Artificial sequence
  Primer
cagcgactccctagggagtcgctg

SEQ ID NO: 1023 - DNA, 24 bp, Artificial sequence
  Primer
cgacgactccctagggagtcgtcg

SEQ ID NO: 1024 - DNA, 24 bp, Artificial sequence
  Primer
cggagactccctagggagtctccg

SEQ ID NO: 1025 - DNA, 24 bp, Artificial sequence
  Primer
ctgcgactccctagggagtcgcag

SEQ ID NO: 1026 - DNA, 24 bp, Artificial sequence
  Primer
cggtgactccctagggagtcaccg

SEQ ID NO: 1027 - DNA, 24 bp, Artificial sequence
  Primer
cacggactccctagggagtccgtg

SEQ ID NO: 1028 - DNA, 24 bp, Artificial sequence
  Primer
cccagactccctagggagtctggg

SEQ ID NO: 1029 - DNA, 24 bp, Artificial sequence
  Primer
ctcggactccctagggagtccgag

SEQ ID NO: 1030 - DNA, 24 bp, Artificial sequence
  Primer
ccctgactccctagggagtcaggg

SEQ ID NO: 1031 - DNA, 24 bp, Artificial sequence
  Primer
ccacgactccctagggagtcgtgg

SEQ ID NO: 1032 - DNA, 24 bp, Artificial sequence
  Primer
agccgactccctagggagtcggct

SEQ ID NO: 1033 - DNA, 24 bp, Artificial sequence
  Primer
tgccgactccctagggagtcggca

SEQ ID NO: 1034 - DNA, 24 bp, Artificial sequence
  Primer
gcgagactccctagggagtctcgc

SEQ ID NO: 1035 - DNA, 24 bp, Artificial sequence
  Primer
gcgtgactccctagggagtcacgc

SEQ ID NO: 1036 - DNA, 24 bp, Artificial sequence
  Primer
gcaggactccctagggagtcctgc

SEQ ID NO: 1037 - DNA, 24 bp, Artificial sequence
  Primer
gctggactccctagggagtccagc

SEQ ID NO: 1038 - DNA, 24 bp, Artificial sequence
  Primer
cgaggactccctagggagtcctcg

SEQ ID NO: 1039 - DNA, 24 bp, Artificial sequence
  Primer
cgtggactccctagggagtccacg

SEQ ID NO: 1040 - DNA, 24 bp, Artificial sequence
  Primer
caccgactccctagggagtcggtg

SEQ ID NO: 1041 - DNA, 24 bp, Artificial sequence
  Primer
ctccgactccctagggagtcggag

SEQ ID NO: 1042 - DNA, 24 bp, Artificial sequence
  Primer
gcgggactccctagggagtcccgc

SEQ ID NO: 1043 - DNA, 24 bp, Artificial sequence
  Primer
gagggactccctagggagtccctc

SEQ ID NO: 1044 - DNA, 24 bp, Artificial sequence
  Primer
gtgggactccctagggagtcccac

SEQ ID NO: 1045 - DNA, 24 bp, Artificial sequence
  Primer
  misc_feature (1)..(4): n is a, c, g, or t
  misc_feature (21)..(24): n is a, c, g, or t
nnnngactcccgcgggagtcnnnn

SEQ ID NO: 1046 - DNA, 24 bp, Artificial sequence
  Primer
ggcggactcccgcgggagtccgcc

SEQ ID NO: 1047 - DNA, 24 bp, Artificial sequence
  Primer
agcggactcccgcgggagtccgct

SEQ ID NO: 1048 - DNA, 24 bp, Artificial sequence
  Primer
gacggactcccgcgggagtccgtc

SEQ ID NO: 1049 - DNA, 24 bp, Artificial sequence
  Primer
ggaggactcccgcgggagtcctcc

SEQ ID NO: 1050 - DNA, 24 bp, Artificial sequence
  Primer
ggcagactcccgcgggagtctgcc

SEQ ID NO: 1051 - DNA, 24 bp, Artificial sequence
  Primer
tgcggactcccgcgggagtccgca

SEQ ID NO: 1052 - DNA, 24 bp, Artificial sequence
  Primer
gtcggactcccgcgggagtccgac

SEQ ID NO: 1053 - DNA, 24 bp, Artificial sequence
  Primer
ggtggactcccgcgggagtccacc

SEQ ID NO: 1054 - DNA, 24 bp, Artificial sequence
  Primer
ggctgactcccgcgggagtcagcc

SEQ ID NO: 1055 - DNA, 24 bp, Artificial sequence
  Primer
gcccgactcccgcgggagtcgggc

SEQ ID NO: 1056 - DNA, 24 bp, Artificial sequence
  Primer
acccgactcccgcgggagtcgggt

SEQ ID NO: 1057 - DNA, 24 bp, Artificial sequence
  Primer
gaccgactcccgcgggagtcggtc

SEQ ID NO: 1058 - DNA, 24 bp, Artificial sequence
  Primer
gcacgactcccgcgggagtcgtgc

SEQ ID NO: 1059 - DNA, 24 bp, Artificial sequence
  Primer
gccagactcccgcgggagtctggc

SEQ ID NO: 1060 - DNA, 24 bp, Artificial sequence
  Primer
tcccgactcccgcgggagtcggga

SEQ ID NO: 1061 - DNA, 24 bp, Artificial sequence
  Primer
gtccgactcccgcgggagtcggac

SEQ ID NO: 1062 - DNA, 24 bp, Artificial sequence
  Primer
gcctgactcccgcgggagtcaggc

SEQ ID NO: 1063 - DNA, 24 bp, Artificial sequence
  Primer
gggcgactcccgcgggagtcgccc

SEQ ID NO: 1064 - DNA, 24 bp, Artificial sequence
  Primer
aggcgactcccgcgggagtcgcct

SEQ ID NO: 1065 - DNA, 24 bp, Artificial sequence
  Primer
gagcgactcccgcgggagtcgctc

SEQ ID NO: 1066 - DNA, 24 bp, Artificial sequence
  Primer
ggacgactcccgcgggagtcgtcc

SEQ ID NO: 1067 - DNA, 24 bp, Artificial sequence
  Primer
gggagactcccgcgggagtctccc

SEQ ID NO: 1068 - DNA, 24 bp, Artificial sequence
  Primer
tggcgactcccgcgggagtcgcca

SEQ ID NO: 1069 - DNA, 24 bp, Artificial sequence
  Primer
gtgcgactcccgcgggagtcgcac

SEQ ID NO: 1070 - DNA, 24 bp, Artificial sequence
  Primer
gggtgactcccgcgggagtcaccc

SEQ ID NO: 1071 - DNA, 24 bp, Artificial sequence
  Primer
acgggactcccgcgggagtcccgt

SEQ ID NO: 1072 - DNA, 24 bp, Artificial sequence
  Primer
cagggactcccgcgggagtccctg

SEQ ID NO: 1073 - DNA, 24 bp, Artificial sequence
  Primer
ccaggactcccgcgggagtcctgg

SEQ ID NO: 1074 - DNA, 24 bp, Artificial sequence
  Primer
ccgagactcccgcgggagtctcgg

SEQ ID NO: 1075 - DNA, 24 bp, Artificial sequence
  Primer
tcgggactcccgcgggagtcccga

SEQ ID NO: 1076 - DNA, 24 bp, Artificial sequence
  Primer
ctgggactcccgcgggagtcccag

SEQ ID NO: 1077 - DNA, 24 bp, Artificial sequence
  Primer
cctggactcccgcgggagtccagg

SEQ ID NO: 1078 - DNA, 24 bp, Artificial sequence
  Primer
ccgtgactcccgcgggagtcacgg

SEQ ID NO: 1079 - DNA, 24 bp, Artificial sequence
  Primer
cggcgactcccgcgggagtcgccg

SEQ ID NO: 1080 - DNA, 24 bp, Artificial sequence
  Primer
cagcgactcccgcgggagtcgctg

SEQ ID NO: 1081 - DNA, 24 bp, Artificial sequence
  Primer
cgacgactcccgcgggagtcgtcg

SEQ ID NO: 1082 - DNA, 24 bp, Artificial sequence
  Primer
cggagactcccgcgggagtctccg

SEQ ID NO: 1083 - DNA, 24 bp, Artificial sequence
  Primer
ctgcgactcccgcgggagtcgcag

SEQ ID NO: 1084 - DNA, 24 bp, Artificial sequence
  Primer
cggtgactcccgcgggagtcaccg

SEQ ID NO: 1085 - DNA, 24 bp, Artificial sequence
  Primer
cacggactcccgcgggagtccgtg

SEQ ID NO: 1086 - DNA, 24 bp, Artificial sequence
  Primer
cccagactcccgcgggagtctggg

SEQ ID NO: 1087 - DNA, 24 bp, Artificial sequence
  Primer
ctcggactcccgcgggagtccgag

SEQ ID NO: 1088 - DNA, 24 bp, Artificial sequence
  Primer
ccctgactcccgcgggagtcaggg

SEQ ID NO: 1089 - DNA, 24 bp, Artificial sequence
  Primer
ccacgactcccgcgggagtcgtgg

SEQ ID NO: 1090 - DNA, 24 bp, Artificial sequence
  Primer
agccgactcccgcgggagtcggct

SEQ ID NO: 1091 - DNA, 24 bp, Artificial sequence
  Primer
tgccgactcccgcgggagtcggca

SEQ ID NO: 1092 - DNA, 24 bp, Artificial sequence
  Primer
gcgagactcccgcgggagtctcgc

SEQ ID NO: 1093 - DNA, 24 bp, Artificial sequence
  Primer
gcgtgactcccgcgggagtcacgc

SEQ ID NO: 1094 - DNA, 24 bp, Artificial sequence
  Primer
gcaggactcccgcgggagtcctgc

SEQ ID NO: 1095 - DNA, 24 bp, Artificial sequence
  Primer
gctggactcccgcgggagtccagc

SEQ ID NO: 1096 - DNA, 24 bp, Artificial sequence
  Primer
cgaggactcccgcgggagtcctcg

SEQ ID NO: 1097 - DNA, 24 bp, Artificial sequence
  Primer
cgtggactcccgcgggagtccacg

SEQ ID NO: 1098 - DNA, 24 bp, Artificial sequence
  Primer
caccgactcccgcgggagtcggtg

SEQ ID NO: 1099 - DNA, 24 bp, Artificial sequence
  Primer
ctccgactcccgcgggagtcggag

SEQ ID NO: 1100 - DNA, 24 bp, Artificial sequence
  Primer
gcgggactcccgcgggagtcccgc

SEQ ID NO: 1101 - DNA, 24 bp, Artificial sequence
  Primer
gagggactcccgcgggagtccctc

SEQ ID NO: 1102 - DNA, 24 bp, Artificial sequence
  Primer
gtgggactcccgcgggagtcccac

SEQ ID NO: 1103 - DNA, 24 bp, Artificial sequence
  Primer
  misc_feature (1)..(4): n is a, c, g, or t
  misc_feature (21)..(24): n is a, c, g, or t
nnnngactccccggggagtcnnnn

SEQ ID NO: 1104 - DNA, 24 bp, Artificial sequence
  Primer
ggcggactccccggggagtccgcc

SEQ ID NO: 1105 - DNA, 24 bp, Artificial sequence
  Primer
agcggactccccggggagtccgct

SEQ ID NO: 1106 - DNA, 24 bp, Artificial sequence
  Primer
gacggactccccggggagtccgtc

SEQ ID NO: 1107 - DNA, 24 bp, Artificial sequence
  Primer
ggaggactccccggggagtcctcc

SEQ ID NO: 1108 - DNA, 24 bp, Artificial sequence
  Primer
ggcagactccccggggagtctgcc

SEQ ID NO: 1109 - DNA, 24 bp, Artificial sequence
  Primer
tgcggactccccggggagtccgca

SEQ ID NO: 1110 - DNA, 24 bp, Artificial sequence
  Primer
gtcggactccccggggagtccgac

SEQ ID NO: 1111 - DNA, 24 bp, Artificial sequence
  Primer
ggtggactccccggggagtccacc

SEQ ID NO: 1112 - DNA, 24 bp, Artificial sequence
  Primer
ggctgactccccggggagtcagcc

SEQ ID NO: 1113 - DNA, 24 bp, Artificial sequence
  Primer
gcccgactccccggggagtcgggc

SEQ ID NO: 1114 - DNA, 24 bp, Artificial sequence
  Primer
acccgactccccggggagtcgggt

SEQ ID NO: 1115 - DNA, 24 bp, Artificial sequence
  Primer
gaccgactccccggggagtcggtc

SEQ ID NO: 1116 - DNA, 24 bp, Artificial sequence
  Primer
gcacgactccccggggagtcgtgc

SEQ ID NO: 1117 - DNA, 24 bp, Artificial sequence
  Primer
gccagactccccggggagtctggc

SEQ ID NO: 1118 - DNA, 24 bp, Artificial sequence
  Primer
tcccgactccccggggagtcggga

SEQ ID NO: 1119 - DNA, 24 bp, Artificial sequence
  Primer
gtccgactccccggggagtcggac

SEQ ID NO: 1120 - DNA, 24 bp, Artificial sequence
  Primer
gcctgactccccggggagtcaggc

SEQ ID NO: 1121 - DNA, 24 bp, Artificial sequence
  Primer
gggcgactccccggggagtcgccc

SEQ ID NO: 1122 - DNA, 24 bp, Artificial sequence
  Primer
aggcgactccccggggagtcgcct

SEQ ID NO: 1123 - DNA, 24 bp, Artificial sequence
  Primer
gagcgactccccggggagtcgctc

SEQ ID NO: 1124 - DNA, 24 bp, Artificial sequence
  Primer
ggacgactccccggggagtcgtcc

SEQ ID NO: 1125 - DNA, 24 bp, Artificial sequence
  Primer
gggagactccccggggagtctccc

SEQ ID NO: 1126 - DNA, 24 bp, Artificial sequence
  Primer
tggcgactccccggggagtcgcca

SEQ ID NO: 1127 - DNA, 24 bp, Artificial sequence
  Primer
gtgcgactccccggggagtcgcac

SEQ ID NO: 1128 - DNA, 24 bp, Artificial sequence
  Primer
gggtgactccccggggagtcaccc

SEQ ID NO: 1129 - DNA, 24 bp, Artificial sequence
  Primer
acgggactccccggggagtcccgt

SEQ ID NO: 1130 - DNA, 24 bp, Artificial sequence
  Primer
cagggactccccggggagtccctg

SEQ ID NO: 1131 - DNA, 24 bp, Artificial sequence
  Primer
ccaggactccccggggagtcctgg

SEQ ID NO: 1132 - DNA, 24 bp, Artificial sequence
  Primer
ccgagactccccggggagtctcgg

SEQ ID NO: 1133 - DNA, 24 bp, Artificial sequence
  Primer
tcgggactccccggggagtcccga

SEQ ID NO: 1134 - DNA, 24 bp, Artificial sequence
  Primer
ctgggactccccggggagtcccag

SEQ ID NO: 1135 - DNA, 24 bp, Artificial sequence
  Primer
cctggactccccggggagtccagg

SEQ ID NO: 1136 - DNA, 24 bp, Artificial sequence
  Primer
ccgtgactccccggggagtcacgg

SEQ ID NO: 1137 - DNA, 24 bp, Artificial sequence
  Primer
cggcgactccccggggagtcgccg

SEQ ID NO: 1138 - DNA, 24 bp, Artificial sequence
  Primer
cagcgactccccggggagtcgctg

SEQ ID NO: 1139 - DNA, 24 bp, Artificial sequence
  Primer
cgacgactccccggggagtcgtcg

SEQ ID NO: 1140 - DNA, 24 bp, Artificial sequence
  Primer
cggagactccccggggagtctccg

SEQ ID NO: 1141 - DNA, 24 bp, Artificial sequence
  Primer
ctgcgactccccggggagtcgcag

SEQ ID NO: 1142 - DNA, 24 bp, Artificial sequence
  Primer
cggtgactccccggggagtcaccg

SEQ ID NO: 1143 - DNA, 24 bp, Artificial sequence
  Primer
cacggactccccggggagtccgtg

SEQ ID NO: 1144 - DNA, 24 bp, Artificial sequence
  Primer
cccagactccccggggagtctggg

SEQ ID NO: 1145 - DNA, 24 bp, Artificial sequence
  Primer
ctcggactccccggggagtccgag

SEQ ID NO: 1146 - DNA, 24 bp, Artificial sequence
  Primer
ccctgactccccggggagtcaggg

SEQ ID NO: 1147 - DNA, 24 bp, Artificial sequence
  Primer
ccacgactccccggggagtcgtgg

SEQ ID NO: 1148 - DNA, 24 bp, Artificial sequence
  Primer
agccgactccccggggagtcggct

SEQ ID NO: 1149 - DNA, 24 bp, Artificial sequence
  Primer
tgccgactccccggggagtcggca

SEQ ID NO: 1150 - DNA, 24 bp, Artificial sequence
  Primer
gcgagactccccggggagtctcgc

SEQ ID NO: 1151 - DNA, 24 bp, Artificial sequence
  Primer
gcgtgactccccggggagtcacgc

SEQ ID NO: 1152 - DNA, 24 bp, Artificial sequence
  Primer
gcaggactccccggggagtcctgc

SEQ ID NO: 1153 - DNA, 24 bp, Artificial sequence
  Primer
gctggactccccggggagtccagc

SEQ ID NO: 1154 - DNA, 24 bp, Artificial sequence
  Primer
cgaggactccccggggagtcctcg

SEQ ID NO: 1155 - DNA, 24 bp, Artificial sequence
  Primer
cgtggactccccggggagtccacg

SEQ ID NO: 1156 - DNA, 24 bp, Artificial sequence
  Primer
caccgactccccggggagtcggtg

SEQ ID NO: 1157 - DNA, 24 bp, Artificial sequence
  Primer
ctccgactccccggggagtcggag

SEQ ID NO: 1158 - DNA, 24 bp, Artificial sequence
  Primer
gcgggactccccggggagtcccgc

SEQ ID NO: 1159 - DNA, 24 bp, Artificial sequence
  Primer
gagggactccccggggagtccctc

SEQ ID NO: 1160 - DNA, 24 bp, Artificial sequence
  Primer
gtgggactccccggggagtcccac

SEQ ID NO: 1161 - DNA, 24 bp, Artificial sequence
  Primer
  misc_feature (1)..(4): n is a, c, g, or t
  misc_feature (21)..(24): n is a, c, g, or t
nnnngactcgtatacgagtcnnnn

SEQ ID NO: 1162 - DNA, 24 bp, Artificial sequence
  Primer
ggcggactcgtatacgagtccgcc

SEQ ID NO: 1163 - DNA, 24 bp, Artificial sequence
  Primer
agcggactcgtatacgagtccgct

SEQ ID NO: 1164 - DNA, 24 bp, Artificial sequence
  Primer
gacggactcgtatacgagtccgtc

SEQ ID NO: 1165 - DNA, 24 bp, Artificial sequence
  Primer
ggaggactcgtatacgagtcctcc

SEQ ID NO: 1166 - DNA, 24 bp, Artificial sequence
  Primer
ggcagactcgtatacgagtctgcc

SEQ ID NO: 1167 - DNA, 24 bp, Artificial sequence
  Primer
tgcggactcgtatacgagtccgca

SEQ ID NO: 1168 - DNA, 24 bp, Artificial sequence
  Primer
gtcggactcgtatacgagtccgac

SEQ ID NO: 1169 - DNA, 24 bp, Artificial sequence
  Primer
ggtggactcgtatacgagtccacc

SEQ ID NO: 1170 - DNA, 24 bp, Artificial sequence
  Primer
ggctgactcgtatacgagtcagcc

SEQ ID NO: 1171 - DNA, 24 bp, Artificial sequence
  Primer
gcccgactcgtatacgagtcgggc

SEQ ID NO: 1172 - DNA, 24 bp, Artificial sequence
  Primer
acccgactcgtatacgagtcgggt

SEQ ID NO: 1173 - DNA, 24 bp, Artificial sequence
  Primer
gaccgactcgtatacgagtcggtc

SEQ ID NO: 1174 - DNA, 24 bp, Artificial sequence
  Primer
gcacgactcgtatacgagtcgtgc

SEQ ID NO: 1175 - DNA, 24 bp, Artificial sequence
  Primer
gccagactcgtatacgagtctggc

SEQ ID NO: 1176 - DNA, 24 bp, Artificial sequence
  Primer
tcccgactcgtatacgagtcggga

SEQ ID NO: 1177 - DNA, 24 bp, Artificial sequence
  Primer
gtccgactcgtatacgagtcggac

SEQ ID NO: 1178 - DNA, 24 bp, Artificial sequence
  Primer
gcctgactcgtatacgagtcaggc

SEQ ID NO: 1179 - DNA, 24 bp, Artificial sequence
  Primer
gggcgactcgtatacgagtcgccc

SEQ ID NO: 1180 - DNA, 24 bp, Artificial sequence
  Primer
aggcgactcgtatacgagtcgcct

SEQ ID NO: 1181 - DNA, 24 bp, Artificial sequence
  Primer
gagcgactcgtatacgagtcgctc

SEQ ID NO: 1182 - DNA, 24 bp, Artificial sequence
  Primer
ggacgactcgtatacgagtcgtcc

SEQ ID NO: 1183 - DNA, 24 bp, Artificial sequence
  Primer
gggagactcgtatacgagtctccc

SEQ ID NO: 1184 - DNA, 24 bp, Artificial sequence
  Primer
tggcgactcgtatacgagtcgcca

SEQ ID NO: 1185 - DNA, 24 bp, Artificial sequence
  Primer
gtgcgactcgtatacgagtcgcac

SEQ ID NO: 1186 - DNA, 24 bp, Artificial sequence
  Primer
gggtgactcgtatacgagtcaccc

SEQ ID NO: 1187 - DNA, 24 bp, Artificial sequence
  Primer
acgggactcgtatacgagtcccgt

SEQ ID NO: 1188 - DNA, 24 bp, Artificial sequence
  Primer
cagggactcgtatacgagtccctg

SEQ ID NO: 1189 - DNA, 24 bp, Artificial sequence
  Primer
ccaggactcgtatacgagtcctgg

SEQ ID NO: 1190 - DNA, 24 bp, Artificial sequence
  Primer
ccgagactcgtatacgagtctcgg

SEQ ID NO: 1191 - DNA, 24 bp, Artificial sequence
  Primer
tcgggactcgtatacgagtcccga

SEQ ID NO: 1192 - DNA, 24 bp, Artificial sequence
  Primer
ctgggactcgtatacgagtcccag

SEQ ID NO: 1193 - DNA, 24 bp, Artificial sequence
  Primer
cctggactcgtatacgagtccagg

SEQ ID NO: 1194 - DNA, 24 bp, Artificial sequence
  Primer
ccgtgactcgtatacgagtcacgg

SEQ ID NO: 1195 - DNA, 24 bp, Artificial sequence
  Primer
cggcgactcgtatacgagtcgccg

SEQ ID NO: 1196 - DNA, 24 bp, Artificial sequence
  Primer
cagcgactcgtatacgagtcgctg

SEQ ID NO: 1197 - DNA, 24 bp, Artificial sequence
  Primer
cgacgactcgtatacgagtcgtcg

SEQ ID NO: 1198 - DNA, 24 bp, Artificial sequence
  Primer
cggagactcgtatacgagtctccg

SEQ ID NO: 1199 - DNA, 24 bp, Artificial sequence
  Primer
ctgcgactcgtatacgagtcgcag

SEQ ID NO: 1200 - DNA, 24 bp, Artificial sequence
  Primer
cggtgactcgtatacgagtcaccg

SEQ ID NO: 1201 - DNA, 24 bp, Artificial sequence
  Primer
cacggactcgtatacgagtccgtg

SEQ ID NO: 1202 - DNA, 24 bp, Artificial sequence
  Primer
cccagactcgtatacgagtctggg

SEQ ID NO: 1203 - DNA, 24 bp, Artificial sequence
  Primer
ctcggactcgtatacgagtccgag

SEQ ID NO: 1204 - DNA, 24 bp, Artificial sequence
  Primer
ccctgactcgtatacgagtcaggg

SEQ ID NO: 1205 - DNA, 24 bp, Artificial sequence
  Primer
ccacgactcgtatacgagtcgtgg

SEQ ID NO: 1206 - DNA, 24 bp, Artificial sequence
  Primer
agccgactcgtatacgagtcggct

SEQ ID NO: 1207 - DNA, 24 bp, Artificial sequence
  Primer
tgccgactcgtatacgagtcggca

SEQ ID NO: 1208 - DNA, 24 bp, Artificial sequence
  Primer
gcgagactcgtatacgagtctcgc

SEQ ID NO: 1209 - DNA, 24 bp, Artificial sequence
  Primer
gcgtgactcgtatacgagtcacgc

SEQ ID NO: 1210 - DNA, 24 bp, Artificial sequence
  Primer
gcaggactcgtatacgagtcctgc

SEQ ID NO: 1211 - DNA, 24 bp, Artificial sequence
  Primer
gctggactcgtatacgagtccagc

SEQ ID NO: 1212 - DNA, 24 bp, Artificial sequence
  Primer
cgaggactcgtatacgagtcctcg

SEQ ID NO: 1213 - DNA, 24 bp, Artificial sequence
  Primer
cgtggactcgtatacgagtccacg

SEQ ID NO: 1214 - DNA, 24 bp, Artificial sequence
  Primer
caccgactcgtatacgagtcggtg

SEQ ID NO: 1215 - DNA, 24 bp, Artificial sequence
  Primer
ctccgactcgtatacgagtcggag

SEQ ID NO: 1216 - DNA, 24 bp, Artificial sequence
  Primer
gcgggactcgtatacgagtcccgc

SEQ ID NO: 1217 - DNA, 24 bp, Artificial sequence
  Primer
gagggactcgtatacgagtccctc

SEQ ID NO: 1218 - DNA, 24 bp, Artificial sequence
  Primer
gtgggactcgtatacgagtcccac

SEQ ID NO: 1219 - DNA, 24 bp, Artificial sequence
  Primer
  misc_feature (1)..(4): n is a, c, g, or t
  misc_feature (21)..(24): n is a, c, g, or t
nnnngactcgttaacgagtcnnnn

SEQ ID NO: 1220 - DNA, 24 bp, Artificial sequence
  Primer
ggcggactcgttaacgagtccgcc

SEQ ID NO: 1221 - DNA, 24 bp, Artificial sequence
  Primer
agcggactcgttaacgagtccgct

SEQ ID NO: 1222 - DNA, 24 bp, Artificial sequence
  Primer
gacggactcgttaacgagtccgtc

SEQ ID NO: 1223 - DNA, 24 bp, Artificial sequence
  Primer
ggaggactcgttaacgagtcctcc

SEQ ID NO: 1224 - DNA, 24 bp, Artificial sequence
  Primer
ggcagactcgttaacgagtctgcc

SEQ ID NO: 1225 - DNA, 24 bp, Artificial sequence
  Primer
tgcggactcgttaacgagtccgca

SEQ ID NO: 1226 - DNA, 24 bp, Artificial sequence
  Primer
gtcggactcgttaacgagtccgac

SEQ ID NO: 1227 - DNA, 24 bp, Artificial sequence
  Primer
ggtggactcgttaacgagtccacc

SEQ ID NO: 1228 - DNA, 24 bp, Artificial sequence
  Primer
ggctgactcgttaacgagtcagcc

SEQ ID NO: 1229 - DNA, 24 bp, Artificial sequence
  Primer
gcccgactcgttaacgagtcgggc

SEQ ID NO: 1230 - DNA, 24 bp, Artificial sequence
  Primer
acccgactcgttaacgagtcgggt

SEQ ID NO: 1231 - DNA, 24 bp, Artificial sequence
  Primer
gaccgactcgttaacgagtcggtc

SEQ ID NO: 1232 - DNA, 24 bp, Artificial sequence
  Primer
gcacgactcgttaacgagtcgtgc

SEQ ID NO: 1233 - DNA, 24 bp, Artificial sequence
  Primer
gccagactcgttaacgagtctggc

SEQ ID NO: 1234 - DNA, 24 bp, Artificial sequence
  Primer
tcccgactcgttaacgagtcggga

SEQ ID NO: 1235 - DNA, 24 bp, Artificial sequence
  Primer
gtccgactcgttaacgagtcggac

SEQ ID NO: 1236 - DNA, 24 bp, Artificial sequence
  Primer
gcctgactcgttaacgagtcaggc

SEQ ID NO: 1237 - DNA, 24 bp, Artificial sequence
  Primer
gggcgactcgttaacgagtcgccc

SEQ ID NO: 1238 - DNA, 24 bp, Artificial sequence
  Primer
aggcgactcgttaacgagtcgcct

SEQ ID NO: 1239 - DNA, 24 bp, Artificial sequence
  Primer
gagcgactcgttaacgagtcgctc

SEQ ID NO: 1240 - DNA, 24 bp, Artificial sequence
  Primer
ggacgactcgttaacgagtcgtcc

SEQ ID NO: 1241 - DNA, 24 bp, Artificial sequence
  Primer
gggagactcgttaacgagtctccc

SEQ ID NO: 1242 - DNA, 24 bp, Artificial sequence
  Primer
tggcgactcgttaacgagtcgcca

SEQ ID NO: 1243 - DNA, 24 bp, Artificial sequence
  Primer
gtgcgactcgttaacgagtcgcac

SEQ ID NO: 1244 - DNA, 24 bp, Artificial sequence
  Primer
gggtgactcgttaacgagtcaccc

SEQ ID NO: 1245 - DNA, 24 bp, Artificial sequence
  Primer
acgggactcgttaacgagtcccgt

SEQ ID NO: 1246 - DNA, 24 bp, Artificial sequence
  Primer
cagggactcgttaacgagtccctg

SEQ ID NO: 1247 - DNA, 24 bp, Artificial sequence
  Primer
ccaggactcgttaacgagtcctgg

SEQ ID NO: 1248 - DNA, 24 bp, Artificial sequence
  Primer
ccgagactcgttaacgagtctcgg

SEQ ID NO: 1249 - DNA, 24 bp, Artificial sequence
  Primer
tcgggactcgttaacgagtcccga

SEQ ID NO: 1250 - DNA, 24 bp, Artificial sequence
  Primer
ctgggactcgttaacgagtcccag

SEQ ID NO: 1251 - DNA, 24 bp, Artificial sequence
  Primer
cctggactcgttaacgagtccagg

SEQ ID NO: 1252 - DNA, 24 bp, Artificial sequence
  Primer
ccgtgactcgttaacgagtcacgg

SEQ ID NO: 1253 - DNA, 24 bp, Artificial sequence
  Primer
cggcgactcgttaacgagtcgccg

SEQ ID NO: 1254 - DNA, 24 bp, Artificial sequence
  Primer
cagcgactcgttaacgagtcgctg

SEQ ID NO: 1255 - DNA, 24 bp, Artificial sequence
  Primer
cgacgactcgttaacgagtcgtcg

SEQ ID NO: 1256 - DNA, 24 bp, Artificial sequence
  Primer
cggagactcgttaacgagtctccg

SEQ ID NO: 1257 - DNA, 24 bp, Artificial sequence
  Primer
ctgcgactcgttaacgagtcgcag

SEQ ID NO: 1258 - DNA, 24 bp, Artificial sequence
  Primer
cggtgactcgttaacgagtcaccg

SEQ ID NO: 1259 - DNA, 24 bp, Artificial sequence
  Primer
cacggactcgttaacgagtccgtg

SEQ ID NO: 1260 - DNA, 24 bp, Artificial sequence
  Primer
cccagactcgttaacgagtctggg

SEQ ID NO: 1261 - DNA, 24 bp, Artificial sequence
  Primer
ctcggactcgttaacgagtccgag

SEQ ID NO: 1262 - DNA, 24 bp, Artificial sequence
  Primer
ccctgactcgttaacgagtcaggg

SEQ ID NO: 1263 - DNA, 24 bp, Artificial sequence
  Primer
ccacgactcgttaacgagtcgtgg

SEQ ID NO: 1264 - DNA, 24 bp, Artificial sequence
  Primer
agccgactcgttaacgagtcggct

SEQ ID NO: 1265 - DNA, 24 bp, Artificial sequence
  Primer
tgccgactcgttaacgagtcggca

SEQ ID NO: 1266 - DNA, 24 bp, Artificial sequence
  Primer
gcgagactcgttaacgagtctcgc

SEQ ID NO: 1267 - DNA, 24 bp, Artificial sequence
  Primer
gcgtgactcgttaacgagtcacgc

SEQ ID NO: 1268 - DNA, 24 bp, Artificial sequence
  Primer
gcaggactcgttaacgagtcctgc

SEQ ID NO: 1269 - DNA, 24 bp, Artificial sequence
  Primer
gctggactcgttaacgagtccagc

SEQ ID NO: 1270 - DNA, 24 bp, Artificial sequence
  Primer
cgaggactcgttaacgagtcctcg

SEQ ID NO: 1271 - DNA, 24 bp, Artificial sequence
  Primer
cgtggactcgttaacgagtccacg

SEQ ID NO: 1272 - DNA, 24 bp, Artificial sequence
  Primer
caccgactcgttaacgagtcggtg

SEQ ID NO: 1273 - DNA, 24 bp, Artificial sequence
  Primer
ctccgactcgttaacgagtcggag

SEQ ID NO: 1274 - DNA, 24 bp, Artificial sequence
  Primer
gcgggactcgttaacgagtcccgc

SEQ ID NO: 1275 - DNA, 24 bp, Artificial sequence
  Primer
gagggactcgttaacgagtccctc

SEQ ID NO: 1276 - DNA, 24 bp, Artificial sequence
  Primer
gtgggactcgttaacgagtcccac

SEQ ID NO: 1277 - DNA, 24 bp, Artificial sequence
  Primer
  misc_feature (1)..(4): n is a, c, g, or t
  misc_feature (21)..(24): n is a, c, g, or t
nnnngactcgtgcacgagtcnnnn

SEQ ID NO: 1278 - DNA, 24 bp, Artificial sequence
  Primer
ggcggactcgtgcacgagtccgcc

SEQ ID NO: 1279 - DNA, 24 bp, Artificial sequence
  Primer
agcggactcgtgcacgagtccgct

SEQ ID NO: 1280 - DNA, 24 bp, Artificial sequence
  Primer
gacggactcgtgcacgagtccgtc

SEQ ID NO: 1281 - DNA, 24 bp, Artificial sequence
  Primer
ggaggactcgtgcacgagtcctcc

SEQ ID NO: 1282 - DNA, 24 bp, Artificial sequence
  Primer
ggcagactcgtgcacgagtctgcc

SEQ ID NO: 1283 - DNA, 24 bp, Artificial sequence
  Primer
tgcggactcgtgcacgagtccgca

SEQ ID NO: 1284 - DNA, 24 bp, Artificial sequence
  Primer
gtcggactcgtgcacgagtccgac

SEQ ID NO: 1285 - DNA, 24 bp, Artificial sequence
  Primer
ggtggactcgtgcacgagtccacc

SEQ ID NO: 1286 - DNA, 24 bp, Artificial sequence
  Primer
ggctgactcgtgcacgagtcagcc

SEQ ID NO: 1287 - DNA, 24 bp, Artificial sequence
  Primer
gcccgactcgtgcacgagtcgggc

SEQ ID NO: 1288 - DNA, 24 bp, Artificial sequence
  Primer
acccgactcgtgcacgagtcgggt

SEQ ID NO: 1289 - DNA, 24 bp, Artificial sequence
  Primer
gaccgactcgtgcacgagtcggtc

SEQ ID NO: 1290 - DNA, 24 bp, Artificial sequence
  Primer
gcacgactcgtgcacgagtcgtgc

SEQ ID NO: 1291 - DNA, 24 bp, Artificial sequence
  Primer
gccagactcgtgcacgagtctggc

SEQ ID NO: 1292 - DNA, 24 bp, Artificial sequence
  Primer
tcccgactcgtgcacgagtcggga

SEQ ID NO: 1293 - DNA, 24 bp, Artificial sequence
  Primer
gtccgactcgtgcacgagtcggac

SEQ ID NO: 1294 - DNA, 24 bp, Artificial sequence
  Primer
gcctgactcgtgcacgagtcaggc

SEQ ID NO: 1295 - DNA, 24 bp, Artificial sequence
  Primer
gggcgactcgtgcacgagtcgccc

SEQ ID NO: 1296 - DNA, 24 bp, Artificial sequence
  Primer
aggcgactcgtgcacgagtcgcct

SEQ ID NO: 1297 - DNA, 24 bp, Artificial sequence
  Primer
gagcgactcgtgcacgagtcgctc

SEQ ID NO: 1298 - DNA, 24 bp, Artificial sequence
  Primer
ggacgactcgtgcacgagtcgtcc

SEQ ID NO: 1299 - DNA, 24 bp, Artificial sequence
  Primer
gggagactcgtgcacgagtctccc

SEQ ID NO: 1300 - DNA, 24 bp, Artificial sequence
  Primer
tggcgactcgtgcacgagtcgcca

SEQ ID NO: 1301 - DNA, 24 bp, Artificial sequence
  Primer
gtgcgactcgtgcacgagtcgcac

SEQ ID NO: 1302 - DNA, 24 bp, Artificial sequence
  Primer
gggtgactcgtgcacgagtcaccc

SEQ ID NO: 1303 - DNA, 24 bp, Artificial sequence
  Primer
acgggactcgtgcacgagtcccgt

SEQ ID NO: 1304 - DNA, 24 bp, Artificial sequence
  Primer
cagggactcgtgcacgagtccctg

SEQ ID NO: 1305 - DNA, 24 bp, Artificial sequence
  Primer
ccaggactcgtgcacgagtcctgg

SEQ ID NO: 1306 - DNA, 24 bp, Artificial sequence
  Primer
ccgagactcgtgcacgagtctcgg

SEQ ID NO: 1307 - DNA, 24 bp, Artificial sequence
  Primer
tcgggactcgtgcacgagtcccga

SEQ ID NO: 1308 - DNA, 24 bp, Artificial sequence
  Primer
ctgggactcgtgcacgagtcccag

SEQ ID NO: 1309 - DNA, 24 bp, Artificial sequence
  Primer
cctggactcgtgcacgagtccagg

SEQ ID NO: 1310 - DNA, 24 bp, Artificial sequence
  Primer
ccgtgactcgtgcacgagtcacgg

SEQ ID NO: 1311 - DNA, 24 bp, Artificial sequence
  Primer
cggcgactcgtgcacgagtcgccg

SEQ ID NO: 1312 - DNA, 24 bp, Artificial sequence
  Primer
cagcgactcgtgcacgagtcgctg

SEQ ID NO: 1313 - DNA, 24 bp, Artificial sequence
  Primer
cgacgactcgtgcacgagtcgtcg

SEQ ID NO: 1314 - DNA, 24 bp, Artificial sequence
  Primer
cggagactcgtgcacgagtctccg

SEQ ID NO: 1315 - DNA, 24 bp, Artificial sequence
  Primer
ctgcgactcgtgcacgagtcgcag

SEQ ID NO: 1316 - DNA, 24 bp, Artificial sequence
  Primer
cggtgactcgtgcacgagtcaccg

SEQ ID NO: 1317 - DNA, 24 bp, Artificial sequence
  Primer
cacggactcgtgcacgagtccgtg

SEQ ID NO: 1318 - DNA, 24 bp, Artificial sequence
  Primer
cccagactcgtgcacgagtctggg

SEQ ID NO: 1319 - DNA, 24 bp, Artificial sequence
  Primer
ctcggactcgtgcacgagtccgag

SEQ ID NO: 1320 - DNA, 24 bp, Artificial sequence
  Primer
ccctgactcgtgcacgagtcaggg

SEQ ID NO: 1321 - DNA, 24 bp, Artificial sequence
  Primer
ccacgactcgtgcacgagtcgtgg

SEQ ID NO: 1322 - DNA, 24 bp, Artificial sequence
  Primer
agccgactcgtgcacgagtcggct

SEQ ID NO: 1323 - DNA, 24 bp, Artificial sequence
  Primer
tgccgactcgtgcacgagtcggca

SEQ ID NO: 1324 - DNA, 24 bp, Artificial sequence
  Primer
gcgagactcgtgcacgagtctcgc

SEQ ID NO: 1325 - DNA, 24 bp, Artificial sequence
  Primer
gcgtgactcgtgcacgagtcacgc

SEQ ID NO: 1326 - DNA, 24 bp, Artificial sequence
  Primer
gcaggactcgtgcacgagtcctgc

SEQ ID NO: 1327 - DNA, 24 bp, Artificial sequence
  Primer
gctggactcgtgcacgagtccagc

SEQ ID NO: 1328 - DNA, 24 bp, Artificial sequence
  Primer
cgaggactcgtgcacgagtcctcg

SEQ ID NO: 1329 - DNA, 24 bp, Artificial sequence
  Primer
cgtggactcgtgcacgagtccacg

SEQ ID NO: 1330 - DNA, 24 bp, Artificial sequence
  Primer
caccgactcgtgcacgagtcggtg

SEQ ID NO: 1331 - DNA, 24 bp, Artificial sequence
  Primer
ctccgactcgtgcacgagtcggag

SEQ ID NO: 1332 - DNA, 24 bp, Artificial sequence
  Primer
gcgggactcgtgcacgagtcccgc

SEQ ID NO: 1333 - DNA, 24 bp, Artificial sequence
  Primer
gagggactcgtgcacgagtccctc

SEQ ID NO: 1334 - DNA, 24 bp, Artificial sequence
  Primer
gtgggactcgtgcacgagtcccac

SEQ ID NO: 1335 - DNA, 24 bp, Artificial sequence
  Primer
  misc_feature (1)..(4): n is a, c, g, or t
  misc_feature (21)..(24): n is a, c, g, or t
nnnngactcgtcgacgagtcnnnn

SEQ ID NO: 1336 - DNA, 24 bp, Artificial sequence
  Primer
ggcggactcgtcgacgagtccgcc

SEQ ID NO: 1337 - DNA, 24 bp, Artificial sequence
  Primer
agcggactcgtcgacgagtccgct

SEQ ID NO: 1338 - DNA, 24 bp, Artificial sequence
  Primer
gacggactcgtcgacgagtccgtc

SEQ ID NO: 1339 - DNA, 24 bp, Artificial sequence
  Primer
ggaggactcgtcgacgagtcctcc

SEQ ID NO: 1340 - DNA, 24 bp, Artificial sequence
  Primer
ggcagactcgtcgacgagtctgcc

SEQ ID NO: 1341 - DNA, 24 bp, Artificial sequence
  Primer
tgcggactcgtcgacgagtccgca

SEQ ID NO: 1342 - DNA, 24 bp, Artificial sequence
  Primer
gtcggactcgtcgacgagtccgac

SEQ ID NO: 1343 - DNA, 24 bp, Artificial sequence
  Primer
ggtggactcgtcgacgagtccacc

SEQ ID NO: 1344 - DNA, 24 bp, Artificial sequence
  Primer
ggctgactcgtcgacgagtcagcc

SEQ ID NO: 1345 - DNA, 24 bp, Artificial sequence
  Primer
gcccgactcgtcgacgagtcgggc

SEQ ID NO: 1346 - DNA, 24 bp, Artificial sequence
  Primer
acccgactcgtcgacgagtcgggt

SEQ ID NO: 1347 - DNA, 24 bp, Artificial sequence
  Primer
gaccgactcgtcgacgagtcggtc

SEQ ID NO: 1348 - DNA, 24 bp, Artificial sequence
  Primer
gcacgactcgtcgacgagtcgtgc

SEQ ID NO: 1349 - DNA, 24 bp, Artificial sequence
  Primer
gccagactcgtcgacgagtctggc

SEQ ID NO: 1350 - DNA, 24 bp, Artificial sequence
  Primer
tcccgactcgtcgacgagtcggga

SEQ ID NO: 1351 - DNA, 24 bp, Artificial sequence
  Primer
gtccgactcgtcgacgagtcggac

SEQ ID NO: 1352 - DNA, 24 bp, Artificial sequence
  Primer
gcctgactcgtcgacgagtcaggc

SEQ ID NO: 1353 - DNA, 24 bp, Artificial sequence
  Primer
gggcgactcgtcgacgagtcgccc

SEQ ID NO: 1354 - DNA, 24 bp, Artificial sequence
  Primer
aggcgactcgtcgacgagtcgcct

SEQ ID NO: 1355 - DNA, 24 bp, Artificial sequence
  Primer
gagcgactcgtcgacgagtcgctc

SEQ ID NO: 1356 - DNA, 24 bp, Artificial sequence
  Primer
ggacgactcgtcgacgagtcgtcc

SEQ ID NO: 1357 - DNA, 24 bp, Artificial sequence
  Primer
gggagactcgtcgacgagtctccc

SEQ ID NO: 1358 - DNA, 24 bp, Artificial sequence
  Primer
tggcgactcgtcgacgagtcgcca

SEQ ID NO: 1359 - DNA, 24 bp, Artificial sequence
  Primer
gtgcgactcgtcgacgagtcgcac

SEQ ID NO: 1360 - DNA, 24 bp, Artificial sequence
  Primer
gggtgactcgtcgacgagtcaccc

SEQ ID NO: 1361 - DNA, 24 bp, Artificial sequence
  Primer
acgggactcgtcgacgagtcccgt

SEQ ID NO: 1362 - DNA, 24 bp, Artificial sequence
  Primer
cagggactcgtcgacgagtccctg

SEQ ID NO: 1363 - DNA, 24 bp, Artificial sequence
  Primer
ccaggactcgtcgacgagtcctgg

SEQ ID NO: 1364 - DNA, 24 bp, Artificial sequence
  Primer
ccgagactcgtcgacgagtctcgg

SEQ ID NO: 1365 - DNA, 24 bp, Artificial sequence
  Primer
tcgggactcgtcgacgagtcccga

SEQ ID NO: 1366 - DNA, 24 bp, Artificial sequence
  Primer
ctgggactcgtcgacgagtcccag

SEQ ID NO: 1367 - DNA, 24 bp, Artificial sequence
  Primer
cctggactcgtcgacgagtccagg

SEQ ID NO: 1368 - DNA, 24 bp, Artificial sequence
  Primer
ccgtgactcgtcgacgagtcacgg

SEQ ID NO: 1369 - DNA, 24 bp, Artificial sequence
  Primer
cggcgactcgtcgacgagtcgccg

SEQ ID NO: 1370 - DNA, 24 bp, Artificial sequence
  Primer
cagcgactcgtcgacgagtcgctg

SEQ ID NO: 1371 - DNA, 24 bp, Artificial sequence
  Primer
cgacgactcgtcgacgagtcgtcg

SEQ ID NO: 1372 - DNA, 24 bp, Artificial sequence
  Primer
cggagactcgtcgacgagtctccg

SEQ ID NO: 1373 - DNA, 24 bp, Artificial sequence
  Primer
ctgcgactcgtcgacgagtcgcag

SEQ ID NO: 1374 - DNA, 24 bp, Artificial sequence
  Primer
cggtgactcgtcgacgagtcaccg

SEQ ID NO: 1375 - DNA, 24 bp, Artificial sequence
  Primer
cacggactcgtcgacgagtccgtg

SEQ ID NO: 1376 - DNA, 24 bp, Artificial sequence
  Primer
cccagactcgtcgacgagtctggg

SEQ ID NO: 1377 - DNA, 24 bp, Artificial sequence
  Primer
ctcggactcgtcgacgagtccgag

SEQ ID NO: 1378 - DNA, 24 bp, Artificial sequence
  Primer
ccctgactcgtcgacgagtcaggg

SEQ ID NO: 1379 - DNA, 24 bp, Artificial sequence
  Primer
ccacgactcgtcgacgagtcgtgg

SEQ ID NO: 1380 - DNA, 24 bp, Artificial sequence
  Primer
agccgactcgtcgacgagtcggct

SEQ ID NO: 1381 - DNA, 24 bp, Artificial sequence
  Primer
tgccgactcgtcgacgagtcggca

SEQ ID NO: 1382 - DNA, 24 bp, Artificial sequence
  Primer
gcgagactcgtcgacgagtctcgc

SEQ ID NO: 1383 - DNA, 24 bp, Artificial sequence
  Primer
gcgtgactcgtcgacgagtcacgc

SEQ ID NO: 1384 - DNA, 24 bp, Artificial sequence
  Primer
gcaggactcgtcgacgagtcctgc

SEQ ID NO: 1385 - DNA, 24 bp, Artificial sequence
  Primer
gctggactcgtcgacgagtccagc

SEQ ID NO: 1386 - DNA, 24 bp, Artificial sequence
  Primer
cgaggactcgtcgacgagtcctcg

SEQ ID NO: 1387 - DNA, 24 bp, Artificial sequence
  Primer
cgtggactcgtcgacgagtccacg

SEQ ID NO: 1388 - DNA, 24 bp, Artificial sequence
  Primer
caccgactcgtcgacgagtcggtg

SEQ ID NO: 1389 - DNA, 24 bp, Artificial sequence
  Primer
ctccgactcgtcgacgagtcggag

SEQ ID NO: 1390 - DNA, 24 bp, Artificial sequence
  Primer
gcgggactcgtcgacgagtcccgc

SEQ ID NO: 1391 - DNA, 24 bp, Artificial sequence
  Primer
gagggactcgtcgacgagtccctc

SEQ ID NO: 1392 - DNA, 24 bp, Artificial sequence
  Primer
gtgggactcgtcgacgagtcccac

SEQ ID NO: 1393 - DNA, 24 bp, Artificial sequence
  Primer
  misc_feature (1)..(4): n is a, c, g, or t
  misc_feature (21)..(24): n is a, c, g, or t
nnnngactcctataggagtcnnnn

SEQ ID NO: 1394 - DNA, 24 bp, Artificial sequence
  Primer
ggcggactcctataggagtccgcc

SEQ ID NO: 1395 - DNA, 24 bp, Artificial sequence
  Primer
agcggactcctataggagtccgct

SEQ ID NO: 1396 - DNA, 24 bp, Artificial sequence
  Primer
gacggactcctataggagtccgtc

SEQ ID NO: 1397 - DNA, 24 bp, Artificial sequence
  Primer
ggaggactcctataggagtcctcc

SEQ ID NO: 1398 - DNA, 24 bp, Artificial sequence
  Primer
ggcagactcctataggagtctgcc

SEQ ID NO: 1399 - DNA, 24 bp, Artificial sequence
  Primer
tgcggactcctataggagtccgca

SEQ ID NO: 1400 - DNA, 24 bp, Artificial sequence
  Primer
gtcggactcctataggagtccgac

SEQ ID NO: 1401 - DNA, 24 bp, Artificial sequence
  Primer
ggtggactcctataggagtccacc

SEQ ID NO: 1402 - DNA, 24 bp, Artificial sequence
  Primer
ggctgactcctataggagtcagcc

SEQ ID NO: 1403 - DNA, 24 bp, Artificial sequence
  Primer
gcccgactcctataggagtcgggc

SEQ ID NO: 1404 - DNA, 24 bp, Artificial sequence
  Primer
acccgactcctataggagtcgggt

SEQ ID NO: 1405 - DNA, 24 bp, Artificial sequence
  Primer
gaccgactcctataggagtcggtc

SEQ ID NO: 1406 - DNA, 24 bp, Artificial sequence
  Primer
gcacgactcctataggagtcgtgc

SEQ ID NO: 1407 - DNA, 24 bp, Artificial sequence
  Primer
gccagactcctataggagtctggc

SEQ ID NO: 1408 - DNA, 24 bp, Artificial sequence
  Primer
tcccgactcctataggagtcggga

SEQ ID NO: 1409 - DNA, 24 bp, Artificial sequence
  Primer
gtccgactcctataggagtcggac

SEQ ID NO: 1410 - DNA, 24 bp, Artificial sequence
  Primer
gcctgactcctataggagtcaggc

SEQ ID NO: 1411 - DNA, 24 bp, Artificial sequence
  Primer
gggcgactcctataggagtcgccc

SEQ ID NO: 1412 - DNA, 24 bp, Artificial sequence
  Primer
aggcgactcctataggagtcgcct

SEQ ID NO: 1413 - DNA, 24 bp, Artificial sequence
  Primer
gagcgactcctataggagtcgctc

SEQ ID NO: 1414 - DNA, 24 bp, Artificial sequence
  Primer
ggacgactcctataggagtcgtcc

SEQ ID NO: 1415 - DNA, 24 bp, Artificial sequence
  Primer
gggagactcctataggagtctccc

SEQ ID NO: 1416 - DNA, 24 bp, Artificial sequence
  Primer
tggcgactcctataggagtcgcca

SEQ ID NO: 1417 - DNA, 24 bp, Artificial sequence
  Primer
gtgcgactcctataggagtcgcac

SEQ ID NO: 1418 - DNA, 24 bp, Artificial sequence
  Primer
gggtgactcctataggagtcaccc

SEQ ID NO: 1419 - DNA, 24 bp, Artificial sequence
  Primer
acgggactcctataggagtcccgt

SEQ ID NO: 1420 - DNA, 24 bp, Artificial sequence
  Primer
cagggactcctataggagtccctg

SEQ ID NO: 1421 - DNA, 24 bp, Artificial sequence
  Primer
ccaggactcctataggagtcctgg

SEQ ID NO: 1422 - DNA, 24 bp, Artificial sequence
  Primer
ccgagactcctataggagtctcgg

SEQ ID NO: 1423 - DNA, 24 bp, Artificial sequence
  Primer
tcgggactcctataggagtcccga

SEQ ID NO: 1424 - DNA, 24 bp, Artificial sequence
  Primer
ctgggactcctataggagtcccag

SEQ ID NO: 1425 - DNA, 24 bp, Artificial sequence
  Primer
cctggactcctataggagtccagg

SEQ ID NO: 1426 - DNA, 24 bp, Artificial sequence
  Primer
ccgtgactcctataggagtcacgg

SEQ ID NO: 1427 - DNA, 24 bp, Artificial sequence
  Primer
cggcgactcctataggagtcgccg

SEQ ID NO: 1428 - DNA, 24 bp, Artificial sequence
  Primer
cagcgactcctataggagtcgctg

SEQ ID NO: 1429 - DNA, 24 bp, Artificial sequence
  Primer
cgacgactcctataggagtcgtcg

SEQ ID NO: 1430 - DNA, 24 bp, Artificial sequence
  Primer
cggagactcctataggagtctccg

SEQ ID NO: 1431 - DNA, 24 bp, Artificial sequence
  Primer
ctgcgactcctataggagtcgcag

SEQ ID NO: 1432 - DNA, 24 bp, Artificial sequence
  Primer
cggtgactcctataggagtcaccg

SEQ ID NO: 1433 - DNA, 24 bp, Artificial sequence
  Primer
cacggactcctataggagtccgtg

SEQ ID NO: 1434 - DNA, 24 bp, Artificial sequence
  Primer
cccagactcctataggagtctggg

SEQ ID NO: 1435 - DNA, 24 bp, Artificial sequence
  Primer
ctcggactcctataggagtccgag

SEQ ID NO: 1436 - DNA, 24 bp, Artificial sequence
  Primer
ccctgactcctataggagtcaggg

SEQ ID NO: 1437 - DNA, 24 bp, Artificial sequence
  Primer
ccacgactcctataggagtcgtgg

SEQ ID NO: 1438 - DNA, 24 bp, Artificial sequence
  Primer
agccgactcctataggagtcggct

SEQ ID NO: 1439 - DNA, 24 bp, Artificial sequence
  Primer
tgccgactcctataggagtcggca

SEQ ID NO: 1440 - DNA, 24 bp, Artificial sequence
  Primer
gcgagactcctataggagtctcgc

SEQ ID NO: 1441 - DNA, 24 bp, Artificial sequence
  Primer
gcgtgactcctataggagtcacgc

SEQ ID NO: 1442 - DNA, 24 bp, Artificial sequence
  Primer
gcaggactcctataggagtcctgc

SEQ ID NO: 1443 - DNA, 24 bp, Artificial sequence
  Primer
gctggactcctataggagtccagc

SEQ ID NO: 1444 - DNA, 24 bp, Artificial sequence
  Primer
cgaggactcctataggagtcctcg

SEQ ID NO: 1445 - DNA, 24 bp, Artificial sequence
  Primer
cgtggactcctataggagtccacg

SEQ ID NO: 1446 - DNA, 24 bp, Artificial sequence
  Primer
caccgactcctataggagtcggtg

SEQ ID NO: 1447 - DNA, 24 bp, Artificial sequence
  Primer
ctccgactcctataggagtcggag

SEQ ID NO: 1448 - DNA, 24 bp, Artificial sequence
  Primer
gcgggactcctataggagtcccgc

SEQ ID NO: 1449 - DNA, 24 bp, Artificial sequence
  Primer
gagggactcctataggagtccctc

SEQ ID NO: 1450 - DNA, 24 bp, Artificial sequence
  Primer
gtgggactcctataggagtcccac

SEQ ID NO: 1451 - DNA, 24 bp, Artificial sequence
  Primer
  misc_feature (1)..(4): n is a, c, g, or t
  misc_feature (21)..(24): n is a, c, g, or t
nnnngactccttaaggagtcnnnn

SEQ ID NO: 1452 - DNA, 24 bp, Artificial sequence
  Primer
ggcggactccttaaggagtccgcc

SEQ ID NO: 1453 - DNA, 24 bp, Artificial sequence
  Primer
agcggactccttaaggagtccgct

SEQ ID NO: 1454 - DNA, 24 bp, Artificial sequence
  Primer
gacggactccttaaggagtccgtc

SEQ ID NO: 1455 - DNA, 24 bp, Artificial sequence
  Primer
ggaggactccttaaggagtcctcc

SEQ ID NO: 1456 - DNA, 24 bp, Artificial sequence
  Primer
ggcagactccttaaggagtctgcc

SEQ ID NO: 1457 - DNA, 24 bp, Artificial sequence
  Primer
tgcggactccttaaggagtccgca

SEQ ID NO: 1458 - DNA, 24 bp, Artificial sequence
  Primer
gtcggactccttaaggagtccgac

SEQ ID NO: 1459 - DNA, 24 bp, Artificial sequence
  Primer
ggtggactccttaaggagtccacc

SEQ ID NO: 1460 - DNA, 24 bp, Artificial sequence
  Primer
ggctgactccttaaggagtcagcc

SEQ ID NO: 1461 - DNA, 24 bp, Artificial sequence
  Primer
gcccgactccttaaggagtcgggc

SEQ ID NO: 1462 - DNA, 24 bp, Artificial sequence
  Primer
acccgactccttaaggagtcgggt

SEQ ID NO: 1463 - DNA, 24 bp, Artificial sequence
  Primer
gaccgactccttaaggagtcggtc

SEQ ID NO: 1464 - DNA, 24 bp, Artificial sequence
  Primer
gcacgactccttaaggagtcgtgc

SEQ ID NO: 1465 - DNA, 24 bp, Artificial sequence
  Primer
gccagactccttaaggagtctggc

SEQ ID NO: 1466 - DNA, 24 bp, Artificial sequence
  Primer
tcccgactccttaaggagtcggga

SEQ ID NO: 1467 - DNA, 24 bp, Artificial sequence
  Primer
gtccgactccttaaggagtcggac

SEQ ID NO: 1468 - DNA, 24 bp, Artificial sequence
  Primer
gcctgactccttaaggagtcaggc

SEQ ID NO: 1469 - DNA, 24 bp, Artificial sequence
  Primer
gggcgactccttaaggagtcgccc

SEQ ID NO: 1470 - DNA, 24 bp, Artificial sequence
  Primer
aggcgactccttaaggagtcgcct

SEQ ID NO: 1471 - DNA, 24 bp, Artificial sequence
  Primer
gagcgactccttaaggagtcgctc

SEQ ID NO: 1472 - DNA, 24 bp, Artificial sequence
  Primer
ggacgactccttaaggagtcgtcc

SEQ ID NO: 1473 - DNA, 24 bp, Artificial sequence
  Primer
gggagactccttaaggagtctccc

SEQ ID NO: 1474 - DNA, 24 bp, Artificial sequence
  Primer
tggcgactccttaaggagtcgcca

SEQ ID NO: 1475 - DNA, 24 bp, Artificial sequence
  Primer
gtgcgactccttaaggagtcgcac

SEQ ID NO: 1476 - DNA, 24 bp, Artificial sequence
  Primer
gggtgactccttaaggagtcaccc

SEQ ID NO: 1477 - DNA, 24 bp, Artificial sequence
  Primer
acgggactccttaaggagtcccgt

SEQ ID NO: 1478 - DNA, 24 bp, Artificial sequence
  Primer
cagggactccttaaggagtccctg

SEQ ID NO: 1479 - DNA, 24 bp, Artificial sequence
  Primer
ccaggactccttaaggagtcctgg

SEQ ID NO: 1480 - DNA, 24 bp, Artificial sequence
  Primer
ccgagactccttaaggagtctcgg

SEQ ID NO: 1481 - DNA, 24 bp, Artificial sequence
  Primer
tcgggactccttaaggagtcccga

SEQ ID NO: 1482 - DNA, 24 bp, Artificial sequence
  Primer
ctgggactccttaaggagtcccag

SEQ ID NO: 1483 - DNA, 24 bp, Artificial sequence
  Primer
cctggactccttaaggagtccagg

SEQ ID NO: 1484 - DNA, 24 bp, Artificial sequence
  Primer
ccgtgactccttaaggagtcacgg

SEQ ID NO: 1485 - DNA, 24 bp, Artificial sequence
  Primer
cggcgactccttaaggagtcgccg

SEQ ID NO: 1486 - DNA, 24 bp, Artificial sequence
  Primer
cagcgactccttaaggagtcgctg

SEQ ID NO: 1487 - DNA, 24 bp, Artificial sequence
  Primer
cgacgactccttaaggagtcgtcg

SEQ ID NO: 1488 - DNA, 24 bp, Artificial sequence
  Primer
cggagactccttaaggagtctccg

SEQ ID NO: 1489 - DNA, 24 bp, Artificial sequence
  Primer
ctgcgactccttaaggagtcgcag

SEQ ID NO: 1490 - DNA, 24 bp, Artificial sequence
  Primer
cggtgactccttaaggagtcaccg

SEQ ID NO: 1491 - DNA, 24 bp, Artificial sequence
  Primer
cacggactccttaaggagtccgtg

SEQ ID NO: 1492 - DNA, 24 bp, Artificial sequence
  Primer
cccagactccttaaggagtctggg

SEQ ID NO: 1493 - DNA, 24 bp, Artificial sequence
  Primer
ctcggactccttaaggagtccgag

SEQ ID NO: 1494 - DNA, 24 bp, Artificial sequence
  Primer
ccctgactccttaaggagtcaggg

SEQ ID NO: 1495 - DNA, 24 bp, Artificial sequence
  Primer
ccacgactccttaaggagtcgtgg

SEQ ID NO: 1496 - DNA, 24 bp, Artificial sequence
  Primer
agccgactccttaaggagtcggct

SEQ ID NO: 1497 - DNA, 24 bp, Artificial sequence
  Primer
tgccgactccttaaggagtcggca

SEQ ID NO: 1498 - DNA, 24 bp, Artificial sequence
  Primer
gcgagactccttaaggagtctcgc

SEQ ID NO: 1499 - DNA, 24 bp, Artificial sequence
  Primer
gcgtgactccttaaggagtcacgc

SEQ ID NO: 1500 - DNA, 24 bp, Artificial sequence
  Primer
gcaggactccttaaggagtcctgc

SEQ ID NO: 1501 - DNA, 24 bp, Artificial sequence
  Primer
gctggactccttaaggagtccagc

SEQ ID NO: 1502 - DNA, 24 bp, Artificial sequence
  Primer
cgaggactccttaaggagtcctcg

SEQ ID NO: 1503 - DNA, 24 bp, Artificial sequence
  Primer
cgtggactccttaaggagtccacg

SEQ ID NO: 1504 - DNA, 24 bp, Artificial sequence
  Primer
caccgactccttaaggagtcggtg

SEQ ID NO: 1505 - DNA, 24 bp, Artificial sequence
  Primer
ctccgactccttaaggagtcggag

SEQ ID NO: 1506 - DNA, 24 bp, Artificial sequence
  Primer
gcgggactccttaaggagtcccgc

SEQ ID NO: 1507 - DNA, 24 bp, Artificial sequence
  Primer
gagggactccttaaggagtccctc

SEQ ID NO: 1508 - DNA, 24 bp, Artificial sequence
  Primer
gtgggactccttaaggagtcccac

SEQ ID NO: 1509 - DNA, 24 bp, Artificial sequence
  Primer
  misc_feature (1)..(4): n is a, c, g, or t
  misc_feature (21)..(24): n is a, c, g, or t
nnnngactcctgcaggagtcnnnn

SEQ ID NO: 1510 - DNA, 24 bp, Artificial sequence
  Primer
ggcggactcctgcaggagtccgcc

SEQ ID NO: 1511 - DNA, 24 bp, Artificial sequence
  Primer
agcggactcctgcaggagtccgct

SEQ ID NO: 1512 - DNA, 24 bp, Artificial sequence
  Primer
gacggactcctgcaggagtccgtc

SEQ ID NO: 1513 - DNA, 24 bp, Artificial sequence
  Primer
ggaggactcctgcaggagtcctcc

SEQ ID NO: 1514 - DNA, 24 bp, Artificial sequence
  Primer
ggcagactcctgcaggagtctgcc

SEQ ID NO: 1515 - DNA, 24 bp, Artificial sequence
  Primer
tgcggactcctgcaggagtccgca

SEQ ID NO: 1516 - DNA, 24 bp, Artificial sequence
  Primer
gtcggactcctgcaggagtccgac

SEQ ID NO: 1517 - DNA, 24 bp, Artificial sequence
  Primer
ggtggactcctgcaggagtccacc

SEQ ID NO: 1518 - DNA, 24 bp, Artificial sequence
  Primer
ggctgactcctgcaggagtcagcc

SEQ ID NO: 1519 - DNA, 24 bp, Artificial sequence
  Primer
gcccgactcctgcaggagtcgggc

SEQ ID NO: 1520 - DNA, 24 bp, Artificial sequence
  Primer
acccgactcctgcaggagtcgggt

SEQ ID NO: 1521 - DNA, 24 bp, Artificial sequence
  Primer
gaccgactcctgcaggagtcggtc

SEQ ID NO: 1522 - DNA, 24 bp, Artificial sequence
  Primer
gcacgactcctgcaggagtcgtgc

SEQ ID NO: 1523 - DNA, 24 bp, Artificial sequence
  Primer
gccagactcctgcaggagtctggc

SEQ ID NO: 1524 - DNA, 24 bp, Artificial sequence
  Primer
tcccgactcctgcaggagtcggga

SEQ ID NO: 1525 - DNA, 24 bp, Artificial sequence
  Primer
gtccgactcctgcaggagtcggac

SEQ ID NO: 1526 - DNA, 24 bp, Artificial sequence
  Primer
gcctgactcctgcaggagtcaggc

SEQ ID NO: 1527 - DNA, 24 bp, Artificial sequence
  Primer
gggcgactcctgcaggagtcgccc

SEQ ID NO: 1528 - DNA, 24 bp, Artificial sequence
  Primer
aggcgactcctgcaggagtcgcct

SEQ ID NO: 1529 - DNA, 24 bp, Artificial sequence
  Primer
gagcgactcctgcaggagtcgctc

SEQ ID NO: 1530 - DNA, 24 bp, Artificial sequence
  Primer
ggacgactcctgcaggagtcgtcc

SEQ ID NO: 1531 - DNA, 24 bp, Artificial sequence
  Primer
gggagactcctgcaggagtctccc

SEQ ID NO: 1532 - DNA, 24 bp, Artificial sequence
  Primer
tggcgactcctgcaggagtcgcca

SEQ ID NO: 1533 - DNA, 24 bp, Artificial sequence
  Primer
gtgcgactcctgcaggagtcgcac

SEQ ID NO: 1534 - DNA, 24 bp, Artificial sequence
  Primer
gggtgactcctgcaggagtcaccc

SEQ ID NO: 1535 - DNA, 24 bp, Artificial sequence
  Primer
acgggactcctgcaggagtcccgt

SEQ ID NO: 1536 - DNA, 24 bp, Artificial sequence
  Primer
cagggactcctgcaggagtccctg

SEQ ID NO: 1537 - DNA, 24 bp, Artificial sequence
  Primer
ccaggactcctgcaggagtcctgg

SEQ ID NO: 1538 - DNA, 24 bp, Artificial sequence
  Primer
ccgagactcctgcaggagtctcgg

SEQ ID NO: 1539 - DNA, 24 bp, Artificial sequence
  Primer
tcgggactcctgcaggagtcccga

SEQ ID NO: 1540 - DNA, 24 bp, Artificial sequence
  Primer
ctgggactcctgcaggagtcccag

SEQ ID NO: 1541 - DNA, 24 bp, Artificial sequence
  Primer
cctggactcctgcaggagtccagg

SEQ ID NO: 1542 - DNA, 24 bp, Artificial sequence
  Primer
ccgtgactcctgcaggagtcacgg

SEQ ID NO: 1543 - DNA, 24 bp, Artificial sequence
  Primer
cggcgactcctgcaggagtcgccg

SEQ ID NO: 1544 - DNA, 24 bp, Artificial sequence
  Primer
cagcgactcctgcaggagtcgctg

SEQ ID NO: 1545 - DNA, 24 bp, Artificial sequence
  Primer
cgacgactcctgcaggagtcgtcg

SEQ ID NO: 1546 - DNA, 24 bp, Artificial sequence
  Primer
cggagactcctgcaggagtctccg

SEQ ID NO: 1547 - DNA, 24 bp, Artificial sequence
  Primer
ctgcgactcctgcaggagtcgcag

SEQ ID NO: 1548 - DNA, 24 bp, Artificial sequence
  Primer
cggtgactcctgcaggagtcaccg

SEQ ID NO: 1549 - DNA, 24 bp, Artificial sequence
  Primer
cacggactcctgcaggagtccgtg

SEQ ID NO: 1550 - DNA, 24 bp, Artificial sequence
  Primer
cccagactcctgcaggagtctggg

SEQ ID NO: 1551 - DNA, 24 bp, Artificial sequence
  Primer
ctcggactcctgcaggagtccgag

SEQ ID NO: 1552 - DNA, 24 bp, Artificial sequence
  Primer
ccctgactcctgcaggagtcaggg

SEQ ID NO: 1553 - DNA, 24 bp, Artificial sequence
  Primer
ccacgactcctgcaggagtcgtgg

SEQ ID NO: 1554 - DNA, 24 bp, Artificial sequence
  Primer
agccgactcctgcaggagtcggct

SEQ ID NO: 1555 - DNA, 24 bp, Artificial sequence
  Primer
tgccgactcctgcaggagtcggca

SEQ ID NO: 1556 - DNA, 24 bp, Artificial sequence
  Primer
gcgagactcctgcaggagtctcgc

SEQ ID NO: 1557 - DNA, 24 bp, Artificial sequence
  Primer
gcgtgactcctgcaggagtcacgc

SEQ ID NO: 1558 - DNA, 24 bp, Artificial sequence
  Primer
gcaggactcctgcaggagtcctgc

SEQ ID NO: 1559 - DNA, 24 bp, Artificial sequence
  Primer
gctggactcctgcaggagtccagc

SEQ ID NO: 1560 - DNA, 24 bp, Artificial sequence
  Primer
cgaggactcctgcaggagtcctcg

SEQ ID NO: 1561 - DNA, 24 bp, Artificial sequence
  Primer
cgtggactcctgcaggagtccacg

SEQ ID NO: 1562 - DNA, 24 bp, Artificial sequence
  Primer
caccgactcctgcaggagtcggtg

SEQ ID NO: 1563 - DNA, 24 bp, Artificial sequence
  Primer
ctccgactcctgcaggagtcggag

SEQ ID NO: 1564 - DNA, 24 bp, Artificial sequence
  Primer
gcgggactcctgcaggagtcccgc

SEQ ID NO: 1565 - DNA, 24 bp, Artificial sequence
  Primer
gagggactcctgcaggagtccctc

SEQ ID NO: 1566 - DNA, 24 bp, Artificial sequence
  Primer
gtgggactcctgcaggagtcccac

SEQ ID NO: 1567 - DNA, 24 bp, Artificial sequence
  Primer
  misc_feature (1)..(4): n is a, c, g, or t
  misc_feature (21)..(24): n is a, c, g, or t
nnnngactcctcgaggagtcnnnn

SEQ ID NO: 1568 - DNA, 24 bp, Artificial sequence
  Primer
ggcggactcctcgaggagtccgcc

SEQ ID NO: 1569 - DNA, 24 bp, Artificial sequence
  Primer
agcggactcctcgaggagtccgct

SEQ ID NO: 1570 - DNA, 24 bp, Artificial sequence
  Primer
gacggactcctcgaggagtccgtc

SEQ ID NO: 1571 - DNA, 24 bp, Artificial sequence
  Primer
ggaggactcctcgaggagtcctcc

SEQ ID NO: 1572 - DNA, 24 bp, Artificial sequence
  Primer
ggcagactcctcgaggagtctgcc

SEQ ID NO: 1573 - DNA, 24 bp, Artificial sequence
  Primer
tgcggactcctcgaggagtccgca

SEQ ID NO: 1574 - DNA, 24 bp, Artificial sequence
  Primer
gtcggactcctcgaggagtccgac

SEQ ID NO: 1575 - DNA, 24 bp, Artificial sequence
  Primer
ggtggactcctcgaggagtccacc

SEQ ID NO: 1576 - DNA, 24 bp, Artificial sequence
  Primer
ggctgactcctcgaggagtcagcc

SEQ ID NO: 1577 - DNA, 24 bp, Artificial sequence
  Primer
gcccgactcctcgaggagtcgggc

SEQ ID NO: 1578 - DNA, 24 bp, Artificial sequence
  Primer
acccgactcctcgaggagtcgggt

SEQ ID NO: 1579 - DNA, 24 bp, Artificial sequence
  Primer
gaccgactcctcgaggagtcggtc

SEQ ID NO: 1580 - DNA, 24 bp, Artificial sequence
  Primer
gcacgactcctcgaggagtcgtgc

SEQ ID NO: 1581 - DNA, 24 bp, Artificial sequence
  Primer
gccagactcctcgaggagtctggc

SEQ ID NO: 1582 - DNA, 24 bp, Artificial sequence
  Primer
tcccgactcctcgaggagtcggga

SEQ ID NO: 1583 - DNA, 24 bp, Artificial sequence
  Primer
gtccgactcctcgaggagtcggac

SEQ ID NO: 1584 - DNA, 24 bp, Artificial sequence
  Primer
gcctgactcctcgaggagtcaggc

SEQ ID NO: 1585 - DNA, 24 bp, Artificial sequence
  Primer
gggcgactcctcgaggagtcgccc

SEQ ID NO: 1586 - DNA, 24 bp, Artificial sequence
  Primer
aggcgactcctcgaggagtcgcct

SEQ ID NO: 1587 - DNA, 24 bp, Artificial sequence
  Primer
gagcgactcctcgaggagtcgctc

SEQ ID NO: 1588 - DNA, 24 bp, Artificial sequence
  Primer
ggacgactcctcgaggagtcgtcc

SEQ ID NO: 1589 - DNA, 24 bp, Artificial sequence
  Primer
gggagactcctcgaggagtctccc

SEQ ID NO: 1590 - DNA, 24 bp, Artificial sequence
  Primer
tggcgactcctcgaggagtcgcca

SEQ ID NO: 1591 - DNA, 24 bp, Artificial sequence
  Primer
gtgcgactcctcgaggagtcgcac

SEQ ID NO: 1592 - DNA, 24 bp, Artificial sequence
  Primer
gggtgactcctcgaggagtcaccc

SEQ ID NO: 1593 - DNA, 24 bp, Artificial sequence
  Primer
acgggactcctcgaggagtcccgt

SEQ ID NO: 1594 - DNA, 24 bp, Artificial sequence
  Primer
cagggactcctcgaggagtccctg

SEQ ID NO: 1595 - DNA, 24 bp, Artificial sequence
  Primer
ccaggactcctcgaggagtcctgg

SEQ ID NO: 1596 - DNA, 24 bp, Artificial sequence
  Primer
ccgagactcctcgaggagtctcgg

SEQ ID NO: 1597 - DNA, 24 bp, Artificial sequence
  Primer
tcgggactcctcgaggagtcccga

SEQ ID NO: 1598 - DNA, 24 bp, Artificial sequence
  Primer
ctgggactcctcgaggagtcccag

SEQ ID NO: 1599 - DNA, 24 bp, Artificial sequence
  Primer
cctggactcctcgaggagtccagg

SEQ ID NO: 1600 - DNA, 24 bp, Artificial sequence
  Primer
ccgtgactcctcgaggagtcacgg

SEQ ID NO: 1601 - DNA, 24 bp, Artificial sequence
  Primer
cggcgactcctcgaggagtcgccg

SEQ ID NO: 1602 - DNA, 24 bp, Artificial sequence
  Primer
cagcgactcctcgaggagtcgctg

SEQ ID NO: 1603 - DNA, 24 bp, Artificial sequence
  Primer
cgacgactcctcgaggagtcgtcg

SEQ ID NO: 1604 - DNA, 24 bp, Artificial sequence
  Primer
cggagactcctcgaggagtctccg

SEQ ID NO: 1605 - DNA, 24 bp, Artificial sequence
  Primer
ctgcgactcctcgaggagtcgcag

SEQ ID NO: 1606 - DNA, 24 bp, Artificial sequence
  Primer
cggtgactcctcgaggagtcaccg

SEQ ID NO: 1607 - DNA, 24 bp, Artificial sequence
  Primer
cacggactcctcgaggagtccgtg

SEQ ID NO: 1608 - DNA, 24 bp, Artificial sequence
  Primer
cccagactcctcgaggagtctggg

SEQ ID NO: 1609 - DNA, 24 bp, Artificial sequence
  Primer
ctcggactcctcgaggagtccgag

SEQ ID NO: 1610 - DNA, 24 bp, Artificial sequence
  Primer
ccctgactcctcgaggagtcaggg

SEQ ID NO: 1611 - DNA, 24 bp, Artificial sequence
  Primer
ccacgactcctcgaggagtcgtgg

SEQ ID NO: 1612 - DNA, 24 bp, Artificial sequence
  Primer
agccgactcctcgaggagtcggct

SEQ ID NO: 1613 - DNA, 24 bp, Artificial sequence
  Primer
tgccgactcctcgaggagtcggca

SEQ ID NO: 1614 - DNA, 24 bp, Artificial sequence
  Primer
gcgagactcctcgaggagtctcgc

SEQ ID NO: 1615 - DNA, 24 bp, Artificial sequence
  Primer
gcgtgactcctcgaggagtcacgc

SEQ ID NO: 1616 - DNA, 24 bp, Artificial sequence
  Primer
gcaggactcctcgaggagtcctgc

SEQ ID NO: 1617 - DNA, 24 bp, Artificial sequence
  Primer
gctggactcctcgaggagtccagc

SEQ ID NO: 1618 - DNA, 24 bp, Artificial sequence
  Primer
cgaggactcctcgaggagtcctcg

SEQ ID NO: 1619 - DNA, 24 bp, Artificial sequence
  Primer
cgtggactcctcgaggagtccacg

SEQ ID NO: 1620 - DNA, 24 bp, Artificial sequence
  Primer
caccgactcctcgaggagtcggtg

SEQ ID NO: 1621 - DNA, 24 bp, Artificial sequence
  Primer
ctccgactcctcgaggagtcggag

SEQ ID NO: 1622 - DNA, 24 bp, Artificial sequence
  Primer
gcgggactcctcgaggagtcccgc

SEQ ID NO: 1623 - DNA, 24 bp, Artificial sequence
  Primer
gagggactcctcgaggagtccctc

SEQ ID NO: 1624 - DNA, 24 bp, Artificial sequence
  Primer
gtgggactcctcgaggagtcccac

SEQ ID NO: 1625 - DNA, 24 bp, Artificial sequence
  Primer
  misc_feature (1)..(4): n is a, c, g, or t
  misc_feature (21)..(24): n is a, c, g, or t
nnnngactccaattggagtcnnnn

SEQ ID NO: 1626 - DNA, 24 bp, Artificial sequence
  Primer
ggcggactccaattggagtccgcc

SEQ ID NO: 1627 - DNA, 24 bp, Artificial sequence
  Primer
agcggactccaattggagtccgct

SEQ ID NO: 1628 - DNA, 24 bp, Artificial sequence
  Primer
gacggactccaattggagtccgtc

SEQ ID NO: 1629 - DNA, 24 bp, Artificial sequence
  Primer
ggaggactccaattggagtcctcc

SEQ ID NO: 1630 - DNA, 24 bp, Artificial sequence
  Primer
ggcagactccaattggagtctgcc

SEQ ID NO: 1631 - DNA, 24 bp, Artificial sequence
  Primer
tgcggactccaattggagtccgca

SEQ ID NO: 1632 - DNA, 24 bp, Artificial sequence
  Primer
gtcggactccaattggagtccgac

SEQ ID NO: 1633 - DNA, 24 bp, Artificial sequence
  Primer
ggtggactccaattggagtccacc

SEQ ID NO: 1634 - DNA, 24 bp, Artificial sequence
  Primer
ggctgactccaattggagtcagcc

SEQ ID NO: 1635 - DNA, 24 bp, Artificial sequence
  Primer
gcccgactccaattggagtcgggc

SEQ ID NO: 1636 - DNA, 24 bp, Artificial sequence
  Primer
acccgactccaattggagtcgggt

SEQ ID NO: 1637 - DNA, 24 bp, Artificial sequence
  Primer
gaccgactccaattggagtcggtc

SEQ ID NO: 1638 - DNA, 24 bp, Artificial sequence
  Primer
gcacgactccaattggagtcgtgc

SEQ ID NO: 1639 - DNA, 24 bp, Artificial sequence
  Primer
gccagactccaattggagtctggc

SEQ ID NO: 1640 - DNA, 24 bp, Artificial sequence
  Primer
tcccgactccaattggagtcggga

SEQ ID NO: 1641 - DNA, 24 bp, Artificial sequence
  Primer
gtccgactccaattggagtcggac

SEQ ID NO: 1642 - DNA, 24 bp, Artificial sequence
  Primer
gcctgactccaattggagtcaggc

SEQ ID NO: 1643 - DNA, 24 bp, Artificial sequence
  Primer
gggcgactccaattggagtcgccc

SEQ ID NO: 1644 - DNA, 24 bp, Artificial sequence
  Primer
aggcgactccaattggagtcgcct

SEQ ID NO: 1645 - DNA, 24 bp, Artificial sequence
  Primer
gagcgactccaattggagtcgctc

SEQ ID NO: 1646 - DNA, 24 bp, Artificial sequence
  Primer
ggacgactccaattggagtcgtcc

SEQ ID NO: 1647 - DNA, 24 bp, Artificial sequence
  Primer
gggagactccaattggagtctccc

SEQ ID NO: 1648 - DNA, 24 bp, Artificial sequence
  Primer
tggcgactccaattggagtcgcca

SEQ ID NO: 1649 - DNA, 24 bp, Artificial sequence
  Primer
gtgcgactccaattggagtcgcac

SEQ ID NO: 1650 - DNA, 24 bp, Artificial sequence
  Primer
gggtgactccaattggagtcaccc

SEQ ID NO: 1651 - DNA, 24 bp, Artificial sequence
  Primer
acgggactccaattggagtcccgt

SEQ ID NO: 1652 - DNA, 24 bp, Artificial sequence
  Primer
cagggactccaattggagtccctg

SEQ ID NO: 1653 - DNA, 24 bp, Artificial sequence
  Primer
ccaggactccaattggagtcctgg

SEQ ID NO: 1654 - DNA, 24 bp, Artificial sequence
  Primer
ccgagactccaattggagtctcgg

SEQ ID NO: 1655 - DNA, 24 bp, Artificial sequence
  Primer
tcgggactccaattggagtcccga

SEQ ID NO: 1656 - DNA, 24 bp, Artificial sequence
  Primer
ctgggactccaattggagtcccag

SEQ ID NO: 1657 - DNA, 24 bp, Artificial sequence
  Primer
cctggactccaattggagtccagg

SEQ ID NO: 1658 - DNA, 24 bp, Artificial sequence
  Primer
ccgtgactccaattggagtcacgg

SEQ ID NO: 1659 - DNA, 24 bp, Artificial sequence
  Primer
cggcgactccaattggagtcgccg

SEQ ID NO: 1660 - DNA, 24 bp, Artificial sequence
  Primer
cagcgactccaattggagtcgctg

SEQ ID NO: 1661 - DNA, 24 bp, Artificial sequence
  Primer
cgacgactccaattggagtcgtcg

SEQ ID NO: 1662 - DNA, 24 bp, Artificial sequence
  Primer
cggagactccaattggagtctccg

SEQ ID NO: 1663 - DNA, 24 bp, Artificial sequence
  Primer
ctgcgactccaattggagtcgcag

SEQ ID NO: 1664 - DNA, 24 bp, Artificial sequence
  Primer
cggtgactccaattggagtcaccg

SEQ ID NO: 1665 - DNA, 24 bp, Artificial sequence
  Primer
cacggactccaattggagtccgtg

SEQ ID NO: 1666 - DNA, 24 bp, Artificial sequence
  Primer
cccagactccaattggagtctggg

SEQ ID NO: 1667 - DNA, 24 bp, Artificial sequence
  Primer
ctcggactccaattggagtccgag

SEQ ID NO: 1668 - DNA, 24 bp, Artificial sequence
  Primer
ccctgactccaattggagtcaggg

SEQ ID NO: 1669 - DNA, 24 bp, Artificial sequence
  Primer
ccacgactccaattggagtcgtgg

SEQ ID NO: 1670 - DNA, 24 bp, Artificial sequence
  Primer
agccgactccaattggagtcggct

SEQ ID NO: 1671 - DNA, 24 bp, Artificial sequence
  Primer
tgccgactccaattggagtcggca

SEQ ID NO: 1672 - DNA, 24 bp, Artificial sequence
  Primer
gcgagactccaattggagtctcgc

SEQ ID NO: 1673 - DNA, 24 bp, Artificial sequence
  Primer
gcgtgactccaattggagtcacgc

SEQ ID NO: 1674 - DNA, 24 bp, Artificial sequence
  Primer
gcaggactccaattggagtcctgc

SEQ ID NO: 1675 - DNA, 24 bp, Artificial sequence
  Primer
gctggactccaattggagtccagc

SEQ ID NO: 1676 - DNA, 24 bp, Artificial sequence
  Primer
cgaggactccaattggagtcctcg

SEQ ID NO: 1677 - DNA, 24 bp, Artificial sequence
  Primer
cgtggactccaattggagtccacg

SEQ ID NO: 1678 - DNA, 24 bp, Artificial sequence
  Primer
caccgactccaattggagtcggtg

SEQ ID NO: 1679 - DNA, 24 bp, Artificial sequence
  Primer
ctccgactccaattggagtcggag

SEQ ID NO: 1680 - DNA, 24 bp, Artificial sequence
  Primer
gcgggactccaattggagtcccgc

SEQ ID NO: 1681 - DNA, 24 bp, Artificial sequence
  Primer
gagggactccaattggagtccctc

SEQ ID NO: 1682 - DNA, 24 bp, Artificial sequence
  Primer
gtgggactccaattggagtcccac

SEQ ID NO: 1683 - DNA, 24 bp, Artificial sequence
  Primer
  misc_feature (1)..(4): n is a, c, g, or t
  misc_feature (21)..(24): n is a, c, g, or t
nnnngactccatatggagtcnnnn

SEQ ID NO: 1684 - DNA, 24 bp, Artificial sequence
  Primer
ggcggactccatatggagtccgcc

SEQ ID NO: 1685 - DNA, 24 bp, Artificial sequence
  Primer
agcggactccatatggagtccgct

SEQ ID NO: 1686 - DNA, 24 bp, Artificial sequence
  Primer
gacggactccatatggagtccgtc

SEQ ID NO: 1687 - DNA, 24 bp, Artificial sequence
  Primer
ggaggactccatatggagtcctcc

SEQ ID NO: 1688 - DNA, 24 bp, Artificial sequence
  Primer
ggcagactccatatggagtctgcc

SEQ ID NO: 1689 - DNA, 24 bp, Artificial sequence
  Primer
tgcggactccatatggagtccgca

SEQ ID NO: 1690 - DNA, 24 bp, Artificial sequence
  Primer
gtcggactccatatggagtccgac

SEQ ID NO: 1691 - DNA, 24 bp, Artificial sequence
  Primer
ggtggactccatatggagtccacc

SEQ ID NO: 1692 - DNA, 24 bp, Artificial sequence
  Primer
ggctgactccatatggagtcagcc

SEQ ID NO: 1693 - DNA, 24 bp, Artificial sequence
  Primer
gcccgactccatatggagtcgggc

SEQ ID NO: 1694 - DNA, 24 bp, Artificial sequence
  Primer
acccgactccatatggagtcgggt

SEQ ID NO: 1695 - DNA, 24 bp, Artificial sequence
  Primer
gaccgactccatatggagtcggtc

SEQ ID NO: 1696 - DNA, 24 bp, Artificial sequence
  Primer
gcacgactccatatggagtcgtgc

SEQ ID NO: 1697 - DNA, 24 bp, Artificial sequence
  Primer
gccagactccatatggagtctggc

SEQ ID NO: 1698 - DNA, 24 bp, Artificial sequence
  Primer
tcccgactccatatggagtcggga

SEQ ID NO: 1699 - DNA, 24 bp, Artificial sequence
  Primer
gtccgactccatatggagtcggac

SEQ ID NO: 1700 - DNA, 24 bp, Artificial sequence
  Primer
gcctgactccatatggagtcaggc

SEQ ID NO: 1701 - DNA, 24 bp, Artificial sequence
  Primer
gggcgactccatatggagtcgccc

SEQ ID NO: 1702 - DNA, 24 bp, Artificial sequence
  Primer
aggcgactccatatggagtcgcct

SEQ ID NO: 1703 - DNA, 24 bp, Artificial sequence
  Primer
gagcgactccatatggagtcgctc

SEQ ID NO: 1704 - DNA, 24 bp, Artificial sequence
  Primer
ggacgactccatatggagtcgtcc

SEQ ID NO: 1705 - DNA, 24 bp, Artificial sequence
  Primer
gggagactccatatggagtctccc

SEQ ID NO: 1706 - DNA, 24 bp, Artificial sequence
  Primer
tggcgactccatatggagtcgcca

SEQ ID NO: 1707 - DNA, 24 bp, Artificial sequence
  Primer
gtgcgactccatatggagtcgcac

SEQ ID NO: 1708 - DNA, 24 bp, Artificial sequence
  Primer
gggtgactccatatggagtcaccc

SEQ ID NO: 1709 - DNA, 24 bp, Artificial sequence
  Primer
acgggactccatatggagtcccgt

SEQ ID NO: 1710 - DNA, 24 bp, Artificial sequence
  Primer
cagggactccatatggagtccctg

SEQ ID NO: 1711 - DNA, 24 bp, Artificial sequence
  Primer
ccaggactccatatggagtcctgg

SEQ ID NO: 1712 - DNA, 24 bp, Artificial sequence
  Primer
ccgagactccatatggagtctcgg

SEQ ID NO: 1713 - DNA, 24 bp, Artificial sequence
  Primer
tcgggactccatatggagtcccga

SEQ ID NO: 1714 - DNA, 24 bp, Artificial sequence
  Primer
ctgggactccatatggagtcccag

SEQ ID NO: 1715 - DNA, 24 bp, Artificial sequence
  Primer
cctggactccatatggagtccagg

SEQ ID NO: 1716 - DNA, 24 bp, Artificial sequence
  Primer
ccgtgactccatatggagtcacgg

SEQ ID NO: 1717 - DNA, 24 bp, Artificial sequence
  Primer
cggcgactccatatggagtcgccg

SEQ ID NO: 1718 - DNA, 24 bp, Artificial sequence
  Primer
cagcgactccatatggagtcgctg

SEQ ID NO: 1719 - DNA, 24 bp, Artificial sequence
  Primer
cgacgactccatatggagtcgtcg

SEQ ID NO: 1720 - DNA, 24 bp, Artificial sequence
  Primer
cggagactccatatggagtctccg

SEQ ID NO: 1721 - DNA, 24 bp, Artificial sequence
  Primer
ctgcgactccatatggagtcgcag

SEQ ID NO: 1722 - DNA, 24 bp, Artificial sequence
  Primer
cggtgactccatatggagtcaccg

SEQ ID NO: 1723 - DNA, 24 bp, Artificial sequence
  Primer
cacggactccatatggagtccgtg

SEQ ID NO: 1724 - DNA, 24 bp, Artificial sequence
  Primer
cccagactccatatggagtctggg

SEQ ID NO: 1725 - DNA, 24 bp, Artificial sequence
  Primer
ctcggactccatatggagtccgag

SEQ ID NO: 1726 - DNA, 24 bp, Artificial sequence
  Primer
ccctgactccatatggagtcaggg

SEQ ID NO: 1727 - DNA, 24 bp, Artificial sequence
  Primer
ccacgactccatatggagtcgtgg

SEQ ID NO: 1728 - DNA, 24 bp, Artificial sequence
  Primer
agccgactccatatggagtcggct

SEQ ID NO: 1729 - DNA, 24 bp, Artificial sequence
  Primer
tgccgactccatatggagtcggca

SEQ ID NO: 1730 - DNA, 24 bp, Artificial sequence
  Primer
gcgagactccatatggagtctcgc

SEQ ID NO: 1731 - DNA, 24 bp, Artificial sequence
  Primer
gcgtgactccatatggagtcacgc

SEQ ID NO: 1732 - DNA, 24 bp, Artificial sequence
  Primer
gcaggactccatatggagtcctgc

SEQ ID NO: 1733 - DNA, 24 bp, Artificial sequence
  Primer
gctggactccatatggagtccagc

SEQ ID NO: 1734 - DNA, 24 bp, Artificial sequence
  Primer
cgaggactccatatggagtcctcg

SEQ ID NO: 1735 - DNA, 24 bp, Artificial sequence
  Primer
cgtggactccatatggagtccacg

SEQ ID NO: 1736 - DNA, 24 bp, Artificial sequence
  Primer
caccgactccatatggagtcggtg

SEQ ID NO: 1737 - DNA, 24 bp, Artificial sequence
  Primer
ctccgactccatatggagtcggag

SEQ ID NO: 1738 - DNA, 24 bp, Artificial sequence
  Primer
gcgggactccatatggagtcccgc

SEQ ID NO: 1739 - DNA, 24 bp, Artificial sequence
  Primer
gagggactccatatggagtccctc

SEQ ID NO: 1740 - DNA, 24 bp, Artificial sequence
  Primer
gtgggactccatatggagtcccac

SEQ ID NO: 1741 - DNA, 24 bp, Artificial sequence
  Primer
  misc_feature (1)..(4): n is a, c, g, or t
  misc_feature (21)..(24): n is a, c, g, or t
nnnngactccagctggagtcnnnn

SEQ ID NO: 1742 - DNA, 24 bp, Artificial sequence
  Primer
ggcggactccagctggagtccgcc

SEQ ID NO: 1743 - DNA, 24 bp, Artificial sequence
  Primer
agcggactccagctggagtccgct

SEQ ID NO: 1744 - DNA, 24 bp, Artificial sequence
  Primer
gacggactccagctggagtccgtc

SEQ ID NO: 1745 - DNA, 24 bp, Artificial sequence
  Primer
ggaggactccagctggagtcctcc

SEQ ID NO: 1746 - DNA, 24 bp, Artificial sequence
  Primer
ggcagactccagctggagtctgcc

SEQ ID NO: 1747 - DNA, 24 bp, Artificial sequence
  Primer
tgcggactccagctggagtccgca

SEQ ID NO: 1748 - DNA, 24 bp, Artificial sequence
  Primer
gtcggactccagctggagtccgac

SEQ ID NO: 1749 - DNA, 24 bp, Artificial sequence
  Primer
ggtggactccagctggagtccacc

SEQ ID NO: 1750 - DNA, 24 bp, Artificial sequence
  Primer
ggctgactccagctggagtcagcc

SEQ ID NO: 1751 - DNA, 24 bp, Artificial sequence
  Primer
gcccgactccagctggagtcgggc

SEQ ID NO: 1752 - DNA, 24 bp, Artificial sequence
  Primer
acccgactccagctggagtcgggt

SEQ ID NO: 1753 - DNA, 24 bp, Artificial sequence
  Primer
gaccgactccagctggagtcggtc

SEQ ID NO: 1754 - DNA, 24 bp, Artificial sequence
  Primer
gcacgactccagctggagtcgtgc

SEQ ID NO: 1755 - DNA, 24 bp, Artificial sequence
  Primer
gccagactccagctggagtctggc

SEQ ID NO: 1756 - DNA, 24 bp, Artificial sequence
  Primer
tcccgactccagctggagtcggga

SEQ ID NO: 1757 - DNA, 24 bp, Artificial sequence
  Primer
gtccgactccagctggagtcggac

SEQ ID NO: 1758 - DNA, 24 bp, Artificial sequence
  Primer
gcctgactccagctggagtcaggc

SEQ ID NO: 1759 - DNA, 24 bp, Artificial sequence
  Primer
gggcgactccagctggagtcgccc

SEQ ID NO: 1760 - DNA, 24 bp, Artificial sequence
  Primer
aggcgactccagctggagtcgcct

SEQ ID NO: 1761 - DNA, 24 bp, Artificial sequence
  Primer
gagcgactccagctggagtcgctc

SEQ ID NO: 1762 - DNA, 24 bp, Artificial sequence
  Primer
ggacgactccagctggagtcgtcc

SEQ ID NO: 1763 - DNA, 24 bp, Artificial sequence
  Primer
gggagactccagctggagtctccc

SEQ ID NO: 1764 - DNA, 24 bp, Artificial sequence
  Primer
tggcgactccagctggagtcgcca

SEQ ID NO: 1765 - DNA, 24 bp, Artificial sequence
  Primer
gtgcgactccagctggagtcgcac

SEQ ID NO: 1766 - DNA, 24 bp, Artificial sequence
  Primer
gggtgactccagctggagtcaccc

SEQ ID NO: 1767 - DNA, 24 bp, Artificial sequence
  Primer
acgggactccagctggagtcccgt

SEQ ID NO: 1768 - DNA, 24 bp, Artificial sequence
  Primer
cagggactccagctggagtccctg

SEQ ID NO: 1769 - DNA, 24 bp, Artificial sequence
  Primer
ccaggactccagctggagtcctgg

SEQ ID NO: 1770 - DNA, 24 bp, Artificial sequence
  Primer
ccgagactccagctggagtctcgg

SEQ ID NO: 1771 - DNA, 24 bp, Artificial sequence
  Primer
tcgggactccagctggagtcccga

SEQ ID NO: 1772 - DNA, 24 bp, Artificial sequence
  Primer
ctgggactccagctggagtcccag

SEQ ID NO: 1773 - DNA, 24 bp, Artificial sequence
  Primer
cctggactccagctggagtccagg

SEQ ID NO: 1774 - DNA, 24 bp, Artificial sequence
  Primer
ccgtgactccagctggagtcacgg

SEQ ID NO: 1775 - DNA, 24 bp, Artificial sequence
  Primer
cggcgactccagctggagtcgccg

SEQ ID NO: 1776 - DNA, 24 bp, Artificial sequence
  Primer
cagcgactccagctggagtcgctg

SEQ ID NO: 1777 - DNA, 24 bp, Artificial sequence
  Primer
cgacgactccagctggagtcgtcg

SEQ ID NO: 1778 - DNA, 24 bp, Artificial sequence
  Primer
cggagactccagctggagtctccg

SEQ ID NO: 1779 - DNA, 24 bp, Artificial sequence
  Primer
ctgcgactccagctggagtcgcag

SEQ ID NO: 1780 - DNA, 24 bp, Artificial sequence
  Primer
cggtgactccagctggagtcaccg

SEQ ID NO: 1781 - DNA, 24 bp, Artificial sequence
  Primer
cacggactccagctggagtccgtg

SEQ ID NO: 1782 - DNA, 24 bp, Artificial sequence
  Primer
cccagactccagctggagtctggg

SEQ ID NO: 1783 - DNA, 24 bp, Artificial sequence
  Primer
ctcggactccagctggagtccgag

SEQ ID NO: 1784 - DNA, 24 bp, Artificial sequence
  Primer
ccctgactccagctggagtcaggg

SEQ ID NO: 1785 - DNA, 24 bp, Artificial sequence
  Primer
ccacgactccagctggagtcgtgg

SEQ ID NO: 1786 - DNA, 24 bp, Artificial sequence
  Primer
agccgactccagctggagtcggct

SEQ ID NO: 1787 - DNA, 24 bp, Artificial sequence
  Primer
tgccgactccagctggagtcggca

SEQ ID NO: 1788 - DNA, 24 bp, Artificial sequence
  Primer
gcgagactccagctggagtctcgc

SEQ ID NO: 1789 - DNA, 24 bp, Artificial sequence
  Primer
gcgtgactccagctggagtcacgc

SEQ ID NO: 1790 - DNA, 24 bp, Artificial sequence
  Primer
gcaggactccagctggagtcctgc

SEQ ID NO: 1791 - DNA, 24 bp, Artificial sequence
  Primer
gctggactccagctggagtccagc

SEQ ID NO: 1792 - DNA, 24 bp, Artificial sequence
  Primer
cgaggactccagctggagtcctcg

SEQ ID NO: 1793 - DNA, 24 bp, Artificial sequence
  Primer
cgtggactccagctggagtccacg

SEQ ID NO: 1794 - DNA, 24 bp, Artificial sequence
  Primer
caccgactccagctggagtcggtg

SEQ ID NO: 1795 - DNA, 24 bp, Artificial sequence
  Primer
ctccgactccagctggagtcggag

SEQ ID NO: 1796 - DNA, 24 bp, Artificial sequence
  Primer
gcgggactccagctggagtcccgc

SEQ ID NO: 1797 - DNA, 24 bp, Artificial sequence
  Primer
gagggactccagctggagtccctc

SEQ ID NO: 1798 - DNA, 24 bp, Artificial sequence
  Primer
gtgggactccagctggagtcccac

SEQ ID NO: 1799 - DNA, 24 bp, Artificial sequence
  Primer
  misc_feature (1)..(4): n is a, c, g, or t
  misc_feature (21)..(24): n is a, c, g, or t
nnnngactccacgtggagtcnnnn

SEQ ID NO: 1800 - DNA, 24 bp, Artificial sequence
  Primer
ggcggactccacgtggagtccgcc

SEQ ID NO: 1801 - DNA, 24 bp, Artificial sequence
  Primer
agcggactccacgtggagtccgct

SEQ ID NO: 1802 - DNA, 24 bp, Artificial sequence
  Primer
gacggactccacgtggagtccgtc

SEQ ID NO: 1803 - DNA, 24 bp, Artificial sequence
  Primer
ggaggactccacgtggagtcctcc

SEQ ID NO: 1804 - DNA, 24 bp, Artificial sequence
  Primer
ggcagactccacgtggagtctgcc

SEQ ID NO: 1805 - DNA, 24 bp, Artificial sequence
  Primer
tgcggactccacgtggagtccgca

SEQ ID NO: 1806 - DNA, 24 bp, Artificial sequence
  Primer
gtcggactccacgtggagtccgac

SEQ ID NO: 1807 - DNA, 24 bp, Artificial sequence
  Primer
ggtggactccacgtggagtccacc

SEQ ID NO: 1808 - DNA, 24 bp, Artificial sequence
  Primer
ggctgactccacgtggagtcagcc

SEQ ID NO: 1809 - DNA, 24 bp, Artificial sequence
  Primer
gcccgactccacgtggagtcgggc

SEQ ID NO: 1810 - DNA, 24 bp, Artificial sequence
  Primer
acccgactccacgtggagtcgggt

SEQ ID NO: 1811 - DNA, 24 bp, Artificial sequence
  Primer
gaccgactccacgtggagtcggtc

SEQ ID NO: 1812 - DNA, 24 bp, Artificial sequence
  Primer
gcacgactccacgtggagtcgtgc

SEQ ID NO: 1813 - DNA, 24 bp, Artificial sequence
  Primer
gccagactccacgtggagtctggc

SEQ ID NO: 1814 - DNA, 24 bp, Artificial sequence
  Primer
tcccgactccacgtggagtcggga

SEQ ID NO: 1815 - DNA, 24 bp, Artificial sequence
  Primer
gtccgactccacgtggagtcggac

SEQ ID NO: 1816 - DNA, 24 bp, Artificial sequence
  Primer
gcctgactccacgtggagtcaggc

SEQ ID NO: 1817 - DNA, 24 bp, Artificial sequence
  Primer
gggcgactccacgtggagtcgccc

SEQ ID NO: 1818 - DNA, 24 bp, Artificial sequence
  Primer
aggcgactccacgtggagtcgcct

SEQ ID NO: 1819 - DNA, 24 bp, Artificial sequence
  Primer
gagcgactccacgtggagtcgctc

SEQ ID NO: 1820 - DNA, 24 bp, Artificial sequence
  Primer
ggacgactccacgtggagtcgtcc

SEQ ID NO: 1821 - DNA, 24 bp, Artificial sequence
  Primer
gggagactccacgtggagtctccc

SEQ ID NO: 1822 - DNA, 24 bp, Artificial sequence
  Primer
tggcgactccacgtggagtcgcca

SEQ ID NO: 1823 - DNA, 24 bp, Artificial sequence
  Primer
gtgcgactccacgtggagtcgcac

SEQ ID NO: 1824 - DNA, 24 bp, Artificial sequence
  Primer
gggtgactccacgtggagtcaccc

SEQ ID NO: 1825 - DNA, 24 bp, Artificial sequence
  Primer
acgggactccacgtggagtcccgt

SEQ ID NO: 1826 - DNA, 24 bp, Artificial sequence
  Primer
cagggactccacgtggagtccctg

SEQ ID NO: 1827 - DNA, 24 bp, Artificial sequence
  Primer
ccaggactccacgtggagtcctgg

SEQ ID NO: 1828 - DNA, 24 bp, Artificial sequence
  Primer
ccgagactccacgtggagtctcgg

SEQ ID NO: 1829 - DNA, 24 bp, Artificial sequence
  Primer
tcgggactccacgtggagtcccga

SEQ ID NO: 1830 - DNA, 24 bp, Artificial sequence
  Primer
ctgggactccacgtggagtcccag

SEQ ID NO: 1831 - DNA, 24 bp, Artificial sequence
  Primer
cctggactccacgtggagtccagg

SEQ ID NO: 1832 - DNA, 24 bp, Artificial sequence
  Primer
ccgtgactccacgtggagtcacgg

SEQ ID NO: 1833 - DNA, 24 bp, Artificial sequence
  Primer
cggcgactccacgtggagtcgccg

SEQ ID NO: 1834 - DNA, 24 bp, Artificial sequence
  Primer
cagcgactccacgtggagtcgctg

SEQ ID NO: 1835 - DNA, 24 bp, Artificial sequence
  Primer
cgacgactccacgtggagtcgtcg

SEQ ID NO: 1836 - DNA, 24 bp, Artificial sequence
  Primer
cggagactccacgtggagtctccg

SEQ ID NO: 1837 - DNA, 24 bp, Artificial sequence
  Primer
ctgcgactccacgtggagtcgcag

SEQ ID NO: 1838 - DNA, 24 bp, Artificial sequence
  Primer
cggtgactccacgtggagtcaccg

SEQ ID NO: 1839 - DNA, 24 bp, Artificial sequence
  Primer
cacggactccacgtggagtccgtg

SEQ ID NO: 1840 - DNA, 24 bp, Artificial sequence
  Primer
cccagactccacgtggagtctggg

SEQ ID NO: 1841 - DNA, 24 bp, Artificial sequence
  Primer
ctcggactccacgtggagtccgag

SEQ ID NO: 1842 - DNA, 24 bp, Artificial sequence
  Primer
ccctgactccacgtggagtcaggg

SEQ ID NO: 1843 - DNA, 24 bp, Artificial sequence
  Primer
ccacgactccacgtggagtcgtgg

SEQ ID NO: 1844 - DNA, 24 bp, Artificial sequence
  Primer
agccgactccacgtggagtcggct

SEQ ID NO: 1845 - DNA, 24 bp, Artificial sequence
  Primer
tgccgactccacgtggagtcggca

SEQ ID NO: 1846 - DNA, 24 bp, Artificial sequence
  Primer
gcgagactccacgtggagtctcgc

SEQ ID NO: 1847 - DNA, 24 bp, Artificial sequence
  Primer
gcgtgactccacgtggagtcacgc

SEQ ID NO: 1848 - DNA, 24 bp, Artificial sequence
  Primer
gcaggactccacgtggagtcctgc

SEQ ID NO: 1849 - DNA, 24 bp, Artificial sequence
  Primer
gctggactccacgtggagtccagc

SEQ ID NO: 1850 - DNA, 24 bp, Artificial sequence
  Primer
cgaggactccacgtggagtcctcg

SEQ ID NO: 1851 - DNA, 24 bp, Artificial sequence
  Primer
cgtggactccacgtggagtccacg

SEQ ID NO: 1852 - DNA, 24 bp, Artificial sequence
  Primer
caccgactccacgtggagtcggtg

SEQ ID NO: 1853 - DNA, 24 bp, Artificial sequence
  Primer
ctccgactccacgtggagtcggag

SEQ ID NO: 1854 - DNA, 24 bp, Artificial sequence
  Primer
gcgggactccacgtggagtcccgc

SEQ ID NO: 1855 - DNA, 24 bp, Artificial sequence
  Primer
gagggactccacgtggagtccctc

SEQ ID NO: 1856 - DNA, 24 bp, Artificial sequence
  Primer
gtgggactccacgtggagtcccac

SEQ ID NO: 1857 - DNA, 24 bp, Artificial sequence
  Primer
  misc_feature (1)..(4): n is a, c, g, or t
  misc_feature (21)..(24): n is a, c, g, or t
nnnngactctcatgagagtcnnnn

SEQ ID NO: 1858 - DNA, 24 bp, Artificial sequence
  Primer
ggcggactctcatgagagtccgcc

SEQ ID NO: 1859 - DNA, 24 bp, Artificial sequence
  Primer
agcggactctcatgagagtccgct

SEQ ID NO: 1860 - DNA, 24 bp, Artificial sequence
  Primer
gacggactctcatgagagtccgtc

SEQ ID NO: 1861 - DNA, 24 bp, Artificial sequence
  Primer
ggaggactctcatgagagtcctcc

SEQ ID NO: 1862 - DNA, 24 bp, Artificial sequence
  Primer
ggcagactctcatgagagtctgcc

SEQ ID NO: 1863 - DNA, 24 bp, Artificial sequence
  Primer
tgcggactctcatgagagtccgca

SEQ ID NO: 1864 - DNA, 24 bp, Artificial sequence
  Primer
gtcggactctcatgagagtccgac

SEQ ID NO: 1865 - DNA, 24 bp, Artificial sequence
  Primer
ggtggactctcatgagagtccacc

SEQ ID NO: 1866 - DNA, 24 bp, Artificial sequence
  Primer
ggctgactctcatgagagtcagcc

SEQ ID NO: 1867 - DNA, 24 bp, Artificial sequence
  Primer
gcccgactctcatgagagtcgggc

SEQ ID NO: 1868 - DNA, 24 bp, Artificial sequence
  Primer
acccgactctcatgagagtcgggt

SEQ ID NO: 1869 - DNA, 24 bp, Artificial sequence
  Primer
gaccgactctcatgagagtcggtc

SEQ ID NO: 1870 - DNA, 24 bp, Artificial sequence
  Primer
gcacgactctcatgagagtcgtgc

SEQ ID NO: 1871 - DNA, 24 bp, Artificial sequence
  Primer
gccagactctcatgagagtctggc

SEQ ID NO: 1872 - DNA, 24 bp, Artificial sequence
  Primer
tcccgactctcatgagagtcggga

SEQ ID NO: 1873 - DNA, 24 bp, Artificial sequence
  Primer
gtccgactctcatgagagtcggac

SEQ ID NO: 1874 - DNA, 24 bp, Artificial sequence
  Primer
gcctgactctcatgagagtcaggc

SEQ ID NO: 1875 - DNA, 24 bp, Artificial sequence
  Primer
gggcgactctcatgagagtcgccc

SEQ ID NO: 1876 - DNA, 24 bp, Artificial sequence
  Primer
aggcgactctcatgagagtcgcct

SEQ ID NO: 1877 - DNA, 24 bp, Artificial sequence
  Primer
gagcgactctcatgagagtcgctc

SEQ ID NO: 1878 - DNA, 24 bp, Artificial sequence
  Primer
ggacgactctcatgagagtcgtcc

SEQ ID NO: 1879 - DNA, 24 bp, Artificial sequence
  Primer
gggagactctcatgagagtctccc

SEQ ID NO: 1880 - DNA, 24 bp, Artificial sequence
  Primer
tggcgactctcatgagagtcgcca

SEQ ID NO: 1881 - DNA, 24 bp, Artificial sequence
  Primer
gtgcgactctcatgagagtcgcac

SEQ ID NO: 1882 - DNA, 24 bp, Artificial sequence
  Primer
gggtgactctcatgagagtcaccc

SEQ ID NO: 1883 - DNA, 24 bp, Artificial sequence
  Primer
acgggactctcatgagagtcccgt

SEQ ID NO: 1884 - DNA, 24 bp, Artificial sequence
  Primer
cagggactctcatgagagtccctg

SEQ ID NO: 1885 - DNA, 24 bp, Artificial sequence
  Primer
ccaggactctcatgagagtcctgg

SEQ ID NO: 1886 - DNA, 24 bp, Artificial sequence
  Primer
ccgagactctcatgagagtctcgg

SEQ ID NO: 1887 - DNA, 24 bp, Artificial sequence
  Primer
tcgggactctcatgagagtcccga

SEQ ID NO: 1888 - DNA, 24 bp, Artificial sequence
  Primer
ctgggactctcatgagagtcccag

SEQ ID NO: 1889 - DNA, 24 bp, Artificial sequence
  Primer
cctggactctcatgagagtccagg

SEQ ID NO: 1890 - DNA, 24 bp, Artificial sequence
  Primer
ccgtgactctcatgagagtcacgg

SEQ ID NO: 1891 - DNA, 24 bp, Artificial sequence
  Primer
cggcgactctcatgagagtcgccg

SEQ ID NO: 1892 - DNA, 24 bp, Artificial sequence
  Primer
cagcgactctcatgagagtcgctg

SEQ ID NO: 1893 - DNA, 24 bp, Artificial sequence
  Primer
cgacgactctcatgagagtcgtcg

SEQ ID NO: 1894 - DNA, 24 bp, Artificial sequence
  Primer
cggagactctcatgagagtctccg

SEQ ID NO: 1895 - DNA, 24 bp, Artificial sequence
  Primer
ctgcgactctcatgagagtcgcag

SEQ ID NO: 1896 - DNA, 24 bp, Artificial sequence
  Primer
cggtgactctcatgagagtcaccg

SEQ ID NO: 1897 - DNA, 24 bp, Artificial sequence
  Primer
cacggactctcatgagagtccgtg

SEQ ID NO: 1898 - DNA, 24 bp, Artificial sequence
  Primer
cccagactctcatgagagtctggg

SEQ ID NO: 1899 - DNA, 24 bp, Artificial sequence
  Primer
ctcggactctcatgagagtccgag

SEQ ID NO: 1900 - DNA, 24 bp, Artificial sequence
  Primer
ccctgactctcatgagagtcaggg

SEQ ID NO: 1901 - DNA, 24 bp, Artificial sequence
  Primer
ccacgactctcatgagagtcgtgg

SEQ ID NO: 1902 - DNA, 24 bp, Artificial sequence
  Primer
agccgactctcatgagagtcggct

SEQ ID NO: 1903 - DNA, 24 bp, Artificial sequence
  Primer
tgccgactctcatgagagtcggca

SEQ ID NO: 1904 - DNA, 24 bp, Artificial sequence
  Primer
gcgagactctcatgagagtctcgc

SEQ ID NO: 1905 - DNA, 24 bp, Artificial sequence
  Primer
gcgtgactctcatgagagtcacgc

SEQ ID NO: 1906 - DNA, 24 bp, Artificial sequence
  Primer
gcaggactctcatgagagtcctgc

SEQ ID NO: 1907 - DNA, 24 bp, Artificial sequence
  Primer
gctggactctcatgagagtccagc

SEQ ID NO: 1908 - DNA, 24 bp, Artificial sequence
  Primer
cgaggactctcatgagagtcctcg

SEQ ID NO: 1909 - DNA, 24 bp, Artificial sequence
  Primer
cgtggactctcatgagagtccacg

SEQ ID NO: 1910 - DNA, 24 bp, Artificial sequence
  Primer
caccgactctcatgagagtcggtg

SEQ ID NO: 1911 - DNA, 24 bp, Artificial sequence
  Primer
ctccgactctcatgagagtcggag

SEQ ID NO: 1912 - DNA, 24 bp, Artificial sequence
  Primer
gcgggactctcatgagagtcccgc

SEQ ID NO: 1913 - DNA, 24 bp, Artificial sequence
  Primer
gagggactctcatgagagtccctc

SEQ ID NO: 1914 - DNA, 24 bp, Artificial sequence
  Primer
gtgggactctcatgagagtcccac

SEQ ID NO: 1915 - DNA, 24 bp, Artificial sequence
  Primer
  misc_feature (1)..(4): n is a, c, g, or t
  misc_feature (21)..(24): n is a, c, g, or t
nnnngactctctagagagtcnnnn

SEQ ID NO: 1916 - DNA, 24 bp, Artificial sequence
  Primer
ggcggactctctagagagtccgcc

SEQ ID NO: 1917 - DNA, 24 bp, Artificial sequence
  Primer
agcggactctctagagagtccgct

SEQ ID NO: 1918 - DNA, 24 bp, Artificial sequence
  Primer
gacggactctctagagagtccgtc

SEQ ID NO: 1919 - DNA, 24 bp, Artificial sequence
  Primer
ggaggactctctagagagtcctcc

SEQ ID NO: 1920 - DNA, 24 bp, Artificial sequence
  Primer
ggcagactctctagagagtctgcc

SEQ ID NO: 1921 - DNA, 24 bp, Artificial sequence
  Primer
tgcggactctctagagagtccgca

SEQ ID NO: 1922 - DNA, 24 bp, Artificial sequence
  Primer
gtcggactctctagagagtccgac

SEQ ID NO: 1923 - DNA, 24 bp, Artificial sequence
  Primer
ggtggactctctagagagtccacc

SEQ ID NO: 1924 - DNA, 24 bp, Artificial sequence
  Primer
ggctgactctctagagagtcagcc

SEQ ID NO: 1925 - DNA, 24 bp, Artificial sequence
  Primer
gcccgactctctagagagtcgggc

SEQ ID NO: 1926 - DNA, 24 bp, Artificial sequence
  Primer
acccgactctctagagagtcgggt

SEQ ID NO: 1927 - DNA, 24 bp, Artificial sequence
  Primer
gaccgactctctagagagtcggtc

SEQ ID NO: 1928 - DNA, 24 bp, Artificial sequence
  Primer
gcacgactctctagagagtcgtgc

SEQ ID NO: 1929 - DNA, 24 bp, Artificial sequence
  Primer
gccagactctctagagagtctggc

SEQ ID NO: 1930 - DNA, 24 bp, Artificial sequence
  Primer
tcccgactctctagagagtcggga

SEQ ID NO: 1931 - DNA, 24 bp, Artificial sequence
  Primer
gtccgactctctagagagtcggac

SEQ ID NO: 1932 - DNA, 24 bp, Artificial sequence
  Primer
gcctgactctctagagagtcaggc

SEQ ID NO: 1933 - DNA, 24 bp, Artificial sequence
  Primer
gggcgactctctagagagtcgccc

SEQ ID NO: 1934 - DNA, 24 bp, Artificial sequence
  Primer
aggcgactctctagagagtcgcct

SEQ ID NO: 1935 - DNA, 24 bp, Artificial sequence
  Primer
gagcgactctctagagagtcgctc

SEQ ID NO: 1936 - DNA, 24 bp, Artificial sequence
  Primer
ggacgactctctagagagtcgtcc

SEQ ID NO: 1937 - DNA, 24 bp, Artificial sequence
  Primer
gggagactctctagagagtctccc

SEQ ID NO: 1938 - DNA, 24 bp, Artificial sequence
  Primer
tggcgactctctagagagtcgcca

SEQ ID NO: 1939 - DNA, 24 bp, Artificial sequence
  Primer
gtgcgactctctagagagtcgcac

SEQ ID NO: 1940 - DNA, 24 bp, Artificial sequence
  Primer
gggtgactctctagagagtcaccc

SEQ ID NO: 1941 - DNA, 24 bp, Artificial sequence
  Primer
acgggactctctagagagtcccgt

SEQ ID NO: 1942 - DNA, 24 bp, Artificial sequence
  Primer
cagggactctctagagagtccctg

SEQ ID NO: 1943 - DNA, 24 bp, Artificial sequence
  Primer
ccaggactctctagagagtcctgg

SEQ ID NO: 1944 - DNA, 24 bp, Artificial sequence
  Primer
ccgagactctctagagagtctcgg

SEQ ID NO: 1945 - DNA, 24 bp, Artificial sequence
  Primer
tcgggactctctagagagtcccga

SEQ ID NO: 1946 - DNA, 24 bp, Artificial sequence
  Primer
ctgggactctctagagagtcccag

SEQ ID NO: 1947 - DNA, 24 bp, Artificial sequence
  Primer
cctggactctctagagagtccagg

SEQ ID NO: 1948 - DNA, 24 bp, Artificial sequence
  Primer
ccgtgactctctagagagtcacgg

SEQ ID NO: 1949 - DNA, 24 bp, Artificial sequence
  Primer
cggcgactctctagagagtcgccg

SEQ ID NO: 1950 - DNA, 24 bp, Artificial sequence
  Primer
cagcgactctctagagagtcgctg

SEQ ID NO: 1951 - DNA, 24 bp, Artificial sequence
  Primer
cgacgactctctagagagtcgtcg

SEQ ID NO: 1952 - DNA, 24 bp, Artificial sequence
  Primer
cggagactctctagagagtctccg

SEQ ID NO: 1953 - DNA, 24 bp, Artificial sequence
  Primer
ctgcgactctctagagagtcgcag

SEQ ID NO: 1954 - DNA, 24 bp, Artificial sequence
  Primer
cggtgactctctagagagtcaccg

SEQ ID NO: 1955 - DNA, 24 bp, Artificial sequence
  Primer
cacggactctctagagagtccgtg

SEQ ID NO: 1956 - DNA, 24 bp, Artificial sequence
  Primer
cccagactctctagagagtctggg

SEQ ID NO: 1957 - DNA, 24 bp, Artificial sequence
  Primer
ctcggactctctagagagtccgag

SEQ ID NO: 1958 - DNA, 24 bp, Artificial sequence
  Primer
ccctgactctctagagagtcaggg

SEQ ID NO: 1959 - DNA, 24 bp, Artificial sequence
  Primer
ccacgactctctagagagtcgtgg

SEQ ID NO: 1960 - DNA, 24 bp, Artificial sequence
  Primer
agccgactctctagagagtcggct

SEQ ID NO: 1961 - DNA, 24 bp, Artificial sequence
  Primer
tgccgactctctagagagtcggca

SEQ ID NO: 1962 - DNA, 24 bp, Artificial sequence
  Primer
gcgagactctctagagagtctcgc

SEQ ID NO: 1963 - DNA, 24 bp, Artificial sequence
  Primer
gcgtgactctctagagagtcacgc

SEQ ID NO: 1964 - DNA, 24 bp, Artificial sequence
  Primer
gcaggactctctagagagtcctgc

SEQ ID NO: 1965 - DNA, 24 bp, Artificial sequence
  Primer
gctggactctctagagagtccagc

SEQ ID NO: 1966 - DNA, 24 bp, Artificial sequence
  Primer
cgaggactctctagagagtcctcg

SEQ ID NO: 1967 - DNA, 24 bp, Artificial sequence
  Primer
cgtggactctctagagagtccacg

SEQ ID NO: 1968 - DNA, 24 bp, Artificial sequence
  Primer
caccgactctctagagagtcggtg

SEQ ID NO: 1969 - DNA, 24 bp, Artificial sequence
  Primer
ctccgactctctagagagtcggag

SEQ ID NO: 1970 - DNA, 24 bp, Artificial sequence
  Primer
gcgggactctctagagagtcccgc

SEQ ID NO: 1971 - DNA, 24 bp, Artificial sequence
  Primer
gagggactctctagagagtccctc

SEQ ID NO: 1972 - DNA, 24 bp, Artificial sequence
  Primer
gtgggactctctagagagtcccac

SEQ ID NO: 1973 - DNA, 24 bp, Artificial sequence
  Primer
  misc_feature (1)..(4): n is a, c, g, or t
  misc_feature (21)..(24): n is a, c, g, or t
nnnngactctcgcgagagtcnnnn

SEQ ID NO: 1974 - DNA, 24 bp, Artificial sequence
  Primer
ggcggactctcgcgagagtccgcc

SEQ ID NO: 1975 - DNA, 24 bp, Artificial sequence
  Primer
agcggactctcgcgagagtccgct

SEQ ID NO: 1976 - DNA, 24 bp, Artificial sequence
  Primer
gacggactctcgcgagagtccgtc

SEQ ID NO: 1977 - DNA, 24 bp, Artificial sequence
  Primer
ggaggactctcgcgagagtcctcc

SEQ ID NO: 1978 - DNA, 24 bp, Artificial sequence
  Primer
ggcagactctcgcgagagtctgcc

SEQ ID NO: 1979 - DNA, 24 bp, Artificial sequence
  Primer
tgcggactctcgcgagagtccgca

SEQ ID NO: 1980 - DNA, 24 bp, Artificial sequence
  Primer
gtcggactctcgcgagagtccgac

SEQ ID NO: 1981 - DNA, 24 bp, Artificial sequence
  Primer
ggtggactctcgcgagagtccacc

SEQ ID NO: 1982 - DNA, 24 bp, Artificial sequence
  Primer
ggctgactctcgcgagagtcagcc

SEQ ID NO: 1983 - DNA, 24 bp, Artificial sequence
  Primer
gcccgactctcgcgagagtcgggc

SEQ ID NO: 1984 - DNA, 24 bp, Artificial sequence
  Primer
acccgactctcgcgagagtcgggt

SEQ ID NO: 1985 - DNA, 24 bp, Artificial sequence
  Primer
gaccgactctcgcgagagtcggtc

SEQ ID NO: 1986 - DNA, 24 bp, Artificial sequence
  Primer
gcacgactctcgcgagagtcgtgc

SEQ ID NO: 1987 - DNA, 24 bp, Artificial sequence
  Primer
gccagactctcgcgagagtctggc

SEQ ID NO: 1988 - DNA, 24 bp, Artificial sequence
  Primer
tcccgactctcgcgagagtcggga

SEQ ID NO: 1989 - DNA, 24 bp, Artificial sequence
  Primer
gtccgactctcgcgagagtcggac

SEQ ID NO: 1990 - DNA, 24 bp, Artificial sequence
  Primer
gcctgactctcgcgagagtcaggc

SEQ ID NO: 1991 - DNA, 24 bp, Artificial sequence
  Primer
gggcgactctcgcgagagtcgccc

SEQ ID NO: 1992 - DNA, 24 bp, Artificial sequence
  Primer
aggcgactctcgcgagagtcgcct

SEQ ID NO: 1993 - DNA, 24 bp, Artificial sequence
  Primer
gagcgactctcgcgagagtcgctc

SEQ ID NO: 1994 - DNA, 24 bp, Artificial sequence
  Primer
ggacgactctcgcgagagtcgtcc

SEQ ID NO: 1995 - DNA, 24 bp, Artificial sequence
  Primer
gggagactctcgcgagagtctccc

SEQ ID NO: 1996 - DNA, 24 bp, Artificial sequence
  Primer
tggcgactctcgcgagagtcgcca

SEQ ID NO: 1997 - DNA, 24 bp, Artificial sequence
  Primer
gtgcgactctcgcgagagtcgcac

SEQ ID NO: 1998 - DNA, 24 bp, Artificial sequence
  Primer
gggtgactctcgcgagagtcaccc

SEQ ID NO: 1999 - DNA, 24 bp, Artificial sequence
  Primer
acgggactctcgcgagagtcccgt

SEQ ID NO: 2000 - DNA, 24 bp, Artificial sequence
  Primer
cagggactctcgcgagagtccctg

SEQ ID NO: 2001 - DNA, 24 bp, Artificial sequence
  Primer
ccaggactctcgcgagagtcctgg

SEQ ID NO: 2002 - DNA, 24 bp, Artificial sequence
  Primer
ccgagactctcgcgagagtctcgg

SEQ ID NO: 2003 - DNA, 24 bp, Artificial sequence
  Primer
tcgggactctcgcgagagtcccga

SEQ ID NO: 2004 - DNA, 24 bp, Artificial sequence
  Primer
ctgggactctcgcgagagtcccag

SEQ ID NO: 2005 - DNA, 24 bp, Artificial sequence
  Primer
cctggactctcgcgagagtccagg

SEQ ID NO: 2006 - DNA, 24 bp, Artificial sequence
  Primer
ccgtgactctcgcgagagtcacgg

SEQ ID NO: 2007 - DNA, 24 bp, Artificial sequence
  Primer
cggcgactctcgcgagagtcgccg

SEQ ID NO: 2008 - DNA, 24 bp, Artificial sequence
  Primer
cagcgactctcgcgagagtcgctg

SEQ ID NO: 2009 - DNA, 24 bp, Artificial sequence
  Primer
cgacgactctcgcgagagtcgtcg

SEQ ID NO: 2010 - DNA, 24 bp, Artificial sequence
  Primer
cggagactctcgcgagagtctccg

SEQ ID NO: 2011 - DNA, 24 bp, Artificial sequence
  Primer
ctgcgactctcgcgagagtcgcag

SEQ ID NO: 2012 - DNA, 24 bp, Artificial sequence
  Primer
cggtgactctcgcgagagtcaccg

SEQ ID NO: 2013 - DNA, 24 bp, Artificial sequence
  Primer
cacggactctcgcgagagtccgtg

SEQ ID NO: 2014 - DNA, 24 bp, Artificial sequence
  Primer
cccagactctcgcgagagtctggg

SEQ ID NO: 2015 - DNA, 24 bp, Artificial sequence
  Primer
ctcggactctcgcgagagtccgag

SEQ ID NO: 2016 - DNA, 24 bp, Artificial sequence
  Primer
ccctgactctcgcgagagtcaggg

SEQ ID NO: 2017 - DNA, 24 bp, Artificial sequence
  Primer
ccacgactctcgcgagagtcgtgg

SEQ ID NO: 2018 - DNA, 24 bp, Artificial sequence
  Primer
agccgactctcgcgagagtcggct

SEQ ID NO: 2019 - DNA, 24 bp, Artificial sequence
  Primer
tgccgactctcgcgagagtcggca

SEQ ID NO: 2020 - DNA, 24 bp, Artificial sequence
  Primer
gcgagactctcgcgagagtctcgc

SEQ ID NO: 2021 - DNA, 24 bp, Artificial sequence
  Primer
gcgtgactctcgcgagagtcacgc

SEQ ID NO: 2022 - DNA, 24 bp, Artificial sequence
  Primer
gcaggactctcgcgagagtcctgc

SEQ ID NO: 2023 - DNA, 24 bp, Artificial sequence
  Primer
gctggactctcgcgagagtccagc

SEQ ID NO: 2024 - DNA, 24 bp, Artificial sequence
  Primer
cgaggactctcgcgagagtcctcg

SEQ ID NO: 2025 - DNA, 24 bp, Artificial sequence
  Primer
cgtggactctcgcgagagtccacg

SEQ ID NO: 2026 - DNA, 24 bp, Artificial sequence
  Primer
caccgactctcgcgagagtcggtg

SEQ ID NO: 2027 - DNA, 24 bp, Artificial sequence
  Primer
ctccgactctcgcgagagtcggag

SEQ ID NO: 2028 - DNA, 24 bp, Artificial sequence
  Primer
gcgggactctcgcgagagtcccgc

SEQ ID NO: 2029 - DNA, 24 bp, Artificial sequence
  Primer
gagggactctcgcgagagtccctc

SEQ ID NO: 2030 - DNA, 24 bp, Artificial sequence
  Primer
gtgggactctcgcgagagtcccac

SEQ ID NO: 2031 - DNA, 24 bp, Artificial sequence
  Primer
  misc_feature (1)..(4): n is a, c, g, or t
  misc_feature (21)..(24): n is a, c, g, or t
nnnngactctccggagagtcnnnn

SEQ ID NO: 2032 - DNA, 24 bp, Artificial sequence
  Primer
ggcggactctccggagagtccgcc

SEQ ID NO: 2033 - DNA, 24 bp, Artificial sequence
  Primer
agcggactctccggagagtccgct

SEQ ID NO: 2034 - DNA, 24 bp, Artificial sequence
  Primer
gacggactctccggagagtccgtc

SEQ ID NO: 2035 - DNA, 24 bp, Artificial sequence
  Primer
ggaggactctccggagagtcctcc

SEQ ID NO: 2036 - DNA, 24 bp, Artificial sequence
  Primer
ggcagactctccggagagtctgcc

SEQ ID NO: 2037 - DNA, 24 bp, Artificial sequence
  Primer
tgcggactctccggagagtccgca

SEQ ID NO: 2038 - DNA, 24 bp, Artificial sequence
  Primer
gtcggactctccggagagtccgac

SEQ ID NO: 2039 - DNA, 24 bp, Artificial sequence
  Primer
ggtggactctccggagagtccacc

SEQ ID NO: 2040 - DNA, 24 bp, Artificial sequence
  Primer
ggctgactctccggagagtcagcc

SEQ ID NO: 2041 - DNA, 24 bp, Artificial sequence
  Primer
gcccgactctccggagagtcgggc

SEQ ID NO: 2042 - DNA, 24 bp, Artificial sequence
  Primer
acccgactctccggagagtcgggt

SEQ ID NO: 2043 - DNA, 24 bp, Artificial sequence
  Primer
gaccgactctccggagagtcggtc

SEQ ID NO: 2044 - DNA, 24 bp, Artificial sequence
  Primer
gcacgactctccggagagtcgtgc

SEQ ID NO: 2045 - DNA, 24 bp, Artificial sequence
  Primer
gccagactctccggagagtctggc

SEQ ID NO: 2046 - DNA, 24 bp, Artificial sequence
  Primer
tcccgactctccggagagtcggga

SEQ ID NO: 2047 - DNA, 24 bp, Artificial sequence
  Primer
gtccgactctccggagagtcggac

SEQ ID NO: 2048 - DNA, 24 bp, Artificial sequence
  Primer
gcctgactctccggagagtcaggc

SEQ ID NO: 2049 - DNA, 24 bp, Artificial sequence
  Primer
gggcgactctccggagagtcgccc

SEQ ID NO: 2050 - DNA, 24 bp, Artificial sequence
  Primer
aggcgactctccggagagtcgcct

SEQ ID NO: 2051 - DNA, 24 bp, Artificial sequence
  Primer
gagcgactctccggagagtcgctc

SEQ ID NO: 2052 - DNA, 24 bp, Artificial sequence
  Primer
ggacgactctccggagagtcgtcc

SEQ ID NO: 2053 - DNA, 24 bp, Artificial sequence
  Primer
gggagactctccggagagtctccc

SEQ ID NO: 2054 - DNA, 24 bp, Artificial sequence
  Primer
tggcgactctccggagagtcgcca

SEQ ID NO: 2055 - DNA, 24 bp, Artificial sequence
  Primer
gtgcgactctccggagagtcgcac

SEQ ID NO: 2056 - DNA, 24 bp, Artificial sequence
  Primer
gggtgactctccggagagtcaccc

SEQ ID NO: 2057 - DNA, 24 bp, Artificial sequence
  Primer
acgggactctccggagagtcccgt

SEQ ID NO: 2058 - DNA, 24 bp, Artificial sequence
  Primer
cagggactctccggagagtccctg

SEQ ID NO: 2059 - DNA, 24 bp, Artificial sequence
  Primer
ccaggactctccggagagtcctgg

SEQ ID NO: 2060 - DNA, 24 bp, Artificial sequence
  Primer
ccgagactctccggagagtctcgg

SEQ ID NO: 2061 - DNA, 24 bp, Artificial sequence
  Primer
tcgggactctccggagagtcccga

SEQ ID NO: 2062 - DNA, 24 bp, Artificial sequence
  Primer
ctgggactctccggagagtcccag

SEQ ID NO: 2063 - DNA, 24 bp, Artificial sequence
  Primer
cctggactctccggagagtccagg

SEQ ID NO: 2064 - DNA, 24 bp, Artificial sequence
  Primer
ccgtgactctccggagagtcacgg

SEQ ID NO: 2065 - DNA, 24 bp, Artificial sequence
  Primer
cggcgactctccggagagtcgccg

SEQ ID NO: 2066 - DNA, 24 bp, Artificial sequence
  Primer
cagcgactctccggagagtcgctg

SEQ ID NO: 2067 - DNA, 24 bp, Artificial sequence
  Primer
cgacgactctccggagagtcgtcg

SEQ ID NO: 2068 - DNA, 24 bp, Artificial sequence
  Primer
cggagactctccggagagtctccg

SEQ ID NO: 2069 - DNA, 24 bp, Artificial sequence
  Primer
ctgcgactctccggagagtcgcag

SEQ ID NO: 2070 - DNA, 24 bp, Artificial sequence
  Primer
cggtgactctccggagagtcaccg

SEQ ID NO: 2071 - DNA, 24 bp, Artificial sequence
  Primer
cacggactctccggagagtccgtg

SEQ ID NO: 2072 - DNA, 24 bp, Artificial sequence
  Primer
cccagactctccggagagtctggg

SEQ ID NO: 2073 - DNA, 24 bp, Artificial sequence
  Primer
ctcggactctccggagagtccgag

SEQ ID NO: 2074 - DNA, 24 bp, Artificial sequence
  Primer
ccctgactctccggagagtcaggg

SEQ ID NO: 2075 - DNA, 24 bp, Artificial sequence
  Primer
ccacgactctccggagagtcgtgg

SEQ ID NO: 2076 - DNA, 24 bp, Artificial sequence
  Primer
agccgactctccggagagtcggct

SEQ ID NO: 2077 - DNA, 24 bp, Artificial sequence
  Primer
tgccgactctccggagagtcggca

SEQ ID NO: 2078 - DNA, 24 bp, Artificial sequence
  Primer
gcgagactctccggagagtctcgc

SEQ ID NO: 2079 - DNA, 24 bp, Artificial sequence
  Primer
gcgtgactctccggagagtcacgc

SEQ ID NO: 2080 - DNA, 24 bp, Artificial sequence
  Primer
gcaggactctccggagagtcctgc

SEQ ID NO: 2081 - DNA, 24 bp, Artificial sequence
  Primer
gctggactctccggagagtccagc

SEQ ID NO: 2082 - DNA, 24 bp, Artificial sequence
  Primer
cgaggactctccggagagtcctcg

SEQ ID NO: 2083 - DNA, 24 bp, Artificial sequence
  Primer
cgtggactctccggagagtccacg

SEQ ID NO: 2084 - DNA, 24 bp, Artificial sequence
  Primer
caccgactctccggagagtcggtg

SEQ ID NO: 2085 - DNA, 24 bp, Artificial sequence
  Primer
ctccgactctccggagagtcggag

SEQ ID NO: 2086 - DNA, 24 bp, Artificial sequence
  Primer
gcgggactctccggagagtcccgc

SEQ ID NO: 2087 - DNA, 24 bp, Artificial sequence
  Primer
gagggactctccggagagtccctc

SEQ ID NO: 2088 - DNA, 24 bp, Artificial sequence
  Primer
gtgggactctccggagagtcccac

SEQ ID NO: 2089 - DNA, 24 bp, Artificial sequence
  Primer
  misc_feature (1)..(4): n is a, c, g, or t
  misc_feature (21)..(24): n is a, c, g, or t
nnnngactcagatctgagtcnnnn

SEQ ID NO: 2090 - DNA, 24 bp, Artificial sequence
  Primer
ggcggactcagatctgagtccgcc

SEQ ID NO: 2091 - DNA, 24 bp, Artificial sequence
  Primer
agcggactcagatctgagtccgct

SEQ ID NO: 2092 - DNA, 24 bp, Artificial sequence
  Primer
gacggactcagatctgagtccgtc

SEQ ID NO: 2093 - DNA, 24 bp, Artificial sequence
  Primer
ggaggactcagatctgagtcctcc

SEQ ID NO: 2094 - DNA, 24 bp, Artificial sequence
  Primer
ggcagactcagatctgagtctgcc

SEQ ID NO: 2095 - DNA, 24 bp, Artificial sequence
  Primer
tgcggactcagatctgagtccgca

SEQ ID NO: 2096 - DNA, 24 bp, Artificial sequence
  Primer
gtcggactcagatctgagtccgac

SEQ ID NO: 2097 - DNA, 24 bp, Artificial sequence
  Primer
ggtggactcagatctgagtccacc

SEQ ID NO: 2098 - DNA, 24 bp, Artificial sequence
  Primer
ggctgactcagatctgagtcagcc

SEQ ID NO: 2099 - DNA, 24 bp, Artificial sequence
  Primer
gcccgactcagatctgagtcgggc

SEQ ID NO: 2100 - DNA, 24 bp, Artificial sequence
  Primer
acccgactcagatctgagtcgggt

SEQ ID NO: 2101 - DNA, 24 bp, Artificial sequence
  Primer
gaccgactcagatctgagtcggtc

SEQ ID NO: 2102 - DNA, 24 bp, Artificial sequence
  Primer
gcacgactcagatctgagtcgtgc

SEQ ID NO: 2103 - DNA, 24 bp, Artificial sequence
  Primer
gccagactcagatctgagtctggc

SEQ ID NO: 2104 - DNA, 24 bp, Artificial sequence
  Primer
tcccgactcagatctgagtcggga

SEQ ID NO: 2105 - DNA, 24 bp, Artificial sequence
  Primer
gtccgactcagatctgagtcggac

SEQ ID NO: 2106 - DNA, 24 bp, Artificial sequence
  Primer
gcctgactcagatctgagtcaggc

SEQ ID NO: 2107 - DNA, 24 bp, Artificial sequence
  Primer
gggcgactcagatctgagtcgccc

SEQ ID NO: 2108 - DNA, 24 bp, Artificial sequence
  Primer
aggcgactcagatctgagtcgcct

SEQ ID NO: 2109 - DNA, 24 bp, Artificial sequence
  Primer
gagcgactcagatctgagtcgctc

SEQ ID NO: 2110 - DNA, 24 bp, Artificial sequence
  Primer
ggacgactcagatctgagtcgtcc

SEQ ID NO: 2111 - DNA, 24 bp, Artificial sequence
  Primer
gggagactcagatctgagtctccc

SEQ ID NO: 2112 - DNA, 24 bp, Artificial sequence
  Primer
tggcgactcagatctgagtcgcca

SEQ ID NO: 2113 - DNA, 24 bp, Artificial sequence
  Primer
gtgcgactcagatctgagtcgcac

SEQ ID NO: 2114 - DNA, 24 bp, Artificial sequence
  Primer
gggtgactcagatctgagtcaccc

SEQ ID NO: 2115 - DNA, 24 bp, Artificial sequence
  Primer
acgggactcagatctgagtcccgt

SEQ ID NO: 2116 - DNA, 24 bp, Artificial sequence
  Primer
cagggactcagatctgagtccctg

SEQ ID NO: 2117 - DNA, 24 bp, Artificial sequence
  Primer
ccaggactcagatctgagtcctgg

SEQ ID NO: 2118 - DNA, 24 bp, Artificial sequence
  Primer
ccgagactcagatctgagtctcgg

SEQ ID NO: 2119 - DNA, 24 bp, Artificial sequence
  Primer
tcgggactcagatctgagtcccga

SEQ ID NO: 2120 - DNA, 24 bp, Artificial sequence
  Primer
ctgggactcagatctgagtcccag

SEQ ID NO: 2121 - DNA, 24 bp, Artificial sequence
  Primer
cctggactcagatctgagtccagg

SEQ ID NO: 2122 - DNA, 24 bp, Artificial sequence
  Primer
ccgtgactcagatctgagtcacgg

SEQ ID NO: 2123 - DNA, 24 bp, Artificial sequence
  Primer
cggcgactcagatctgagtcgccg

SEQ ID NO: 2124 - DNA, 24 bp, Artificial sequence
  Primer
cagcgactcagatctgagtcgctg

SEQ ID NO: 2125 - DNA, 24 bp, Artificial sequence
  Primer
cgacgactcagatctgagtcgtcg

SEQ ID NO: 2126 - DNA, 24 bp, Artificial sequence
  Primer
cggagactcagatctgagtctccg

SEQ ID NO: 2127 - DNA, 24 bp, Artificial sequence
  Primer
ctgcgactcagatctgagtcgcag

SEQ ID NO: 2128 - DNA, 24 bp, Artificial sequence
  Primer
cggtgactcagatctgagtcaccg

SEQ ID NO: 2129 - DNA, 24 bp, Artificial sequence
  Primer
cacggactcagatctgagtccgtg

SEQ ID NO: 2130 - DNA, 24 bp, Artificial sequence
  Primer
cccagactcagatctgagtctggg

SEQ ID NO: 2131 - DNA, 24 bp, Artificial sequence
  Primer
ctcggactcagatctgagtccgag

SEQ ID NO: 2132 - DNA, 24 bp, Artificial sequence
  Primer
ccctgactcagatctgagtcaggg

SEQ ID NO: 2133 - DNA, 24 bp, Artificial sequence
  Primer
ccacgactcagatctgagtcgtgg

SEQ ID NO: 2134 - DNA, 24 bp, Artificial sequence
  Primer
agccgactcagatctgagtcggct

SEQ ID NO: 2135 - DNA, 24 bp, Artificial sequence
  Primer
tgccgactcagatctgagtcggca

SEQ ID NO: 2136 - DNA, 24 bp, Artificial sequence
  Primer
gcgagactcagatctgagtctcgc

SEQ ID NO: 2137 - DNA, 24 bp, Artificial sequence
  Primer
gcgtgactcagatctgagtcacgc

SEQ ID NO: 2138 - DNA, 24 bp, Artificial sequence
  Primer
gcaggactcagatctgagtcctgc

SEQ ID NO: 2139 - DNA, 24 bp, Artificial sequence
  Primer
gctggactcagatctgagtccagc

SEQ ID NO: 2140 - DNA, 24 bp, Artificial sequence
  Primer
cgaggactcagatctgagtcctcg

SEQ ID NO: 2141 - DNA, 24 bp, Artificial sequence
  Primer
cgtggactcagatctgagtccacg

SEQ ID NO: 2142 - DNA, 24 bp, Artificial sequence
  Primer
caccgactcagatctgagtcggtg

SEQ ID NO: 2143 - DNA, 24 bp, Artificial sequence
  Primer
ctccgactcagatctgagtcggag

SEQ ID NO: 2144 - DNA, 24 bp, Artificial sequence
  Primer
gcgggactcagatctgagtcccgc

SEQ ID NO: 2145 - DNA, 24 bp, Artificial sequence
  Primer
gagggactcagatctgagtccctc

SEQ ID NO: 2146 - DNA, 24 bp, Artificial sequence
  Primer
gtgggactcagatctgagtcccac

SEQ ID NO: 2147 - DNA, 24 bp, Artificial sequence
  Primer
  misc_feature (1)..(4): n is a, c, g, or t
  misc_feature (21)..(24): n is a, c, g, or t
nnnngactcagtactgagtcnnnn

SEQ ID NO: 2148 - DNA, 24 bp, Artificial sequence
  Primer
ggcggactcagtactgagtccgcc

SEQ ID NO: 2149 - DNA, 24 bp, Artificial sequence
  Primer
agcggactcagtactgagtccgct

SEQ ID NO: 2150 - DNA, 24 bp, Artificial sequence
  Primer
gacggactcagtactgagtccgtc

SEQ ID NO: 2151 - DNA, 24 bp, Artificial sequence
  Primer
ggaggactcagtactgagtcctcc

SEQ ID NO: 2152 - DNA, 24 bp, Artificial sequence
  Primer
ggcagactcagtactgagtctgcc

SEQ ID NO: 2153 - DNA, 24 bp, Artificial sequence
  Primer
tgcggactcagtactgagtccgca

SEQ ID NO: 2154 - DNA, 24 bp, Artificial sequence
  Primer
gtcggactcagtactgagtccgac

SEQ ID NO: 2155 - DNA, 24 bp, Artificial sequence
  Primer
ggtggactcagtactgagtccacc

SEQ ID NO: 2156 - DNA, 24 bp, Artificial sequence
  Primer
ggctgactcagtactgagtcagcc

SEQ ID NO: 2157 - DNA, 24 bp, Artificial sequence
  Primer
gcccgactcagtactgagtcgggc

SEQ ID NO: 2158 - DNA, 24 bp, Artificial sequence
  Primer
acccgactcagtactgagtcgggt

SEQ ID NO: 2159 - DNA, 24 bp, Artificial sequence
  Primer
gaccgactcagtactgagtcggtc

SEQ ID NO: 2160 - DNA, 24 bp, Artificial sequence
  Primer
gcacgactcagtactgagtcgtgc

SEQ ID NO: 2161 - DNA, 24 bp, Artificial sequence
  Primer
gccagactcagtactgagtctggc

SEQ ID NO: 2162 - DNA, 24 bp, Artificial sequence
  Primer
tcccgactcagtactgagtcggga

SEQ ID NO: 2163 - DNA, 24 bp, Artificial sequence
  Primer
gtccgactcagtactgagtcggac

SEQ ID NO: 2164 - DNA, 24 bp, Artificial sequence
  Primer
gcctgactcagtactgagtcaggc

SEQ ID NO: 2165 - DNA, 24 bp, Artificial sequence
  Primer
gggcgactcagtactgagtcgccc

SEQ ID NO: 2166 - DNA, 24 bp, Artificial sequence
  Primer
aggcgactcagtactgagtcgcct

SEQ ID NO: 2167 - DNA, 24 bp, Artificial sequence
  Primer
gagcgactcagtactgagtcgctc

SEQ ID NO: 2168 - DNA, 24 bp, Artificial sequence
  Primer
ggacgactcagtactgagtcgtcc

SEQ ID NO: 2169 - DNA, 24 bp, Artificial sequence
  Primer
gggagactcagtactgagtctccc

SEQ ID NO: 2170 - DNA, 24 bp, Artificial sequence
  Primer
tggcgactcagtactgagtcgcca

SEQ ID NO: 2171 - DNA, 24 bp, Artificial sequence
  Primer
gtgcgactcagtactgagtcgcac

SEQ ID NO: 2172 - DNA, 24 bp, Artificial sequence
  Primer
gggtgactcagtactgagtcaccc

SEQ ID NO: 2173 - DNA, 24 bp, Artificial sequence
  Primer
acgggactcagtactgagtcccgt

SEQ ID NO: 2174 - DNA, 24 bp, Artificial sequence
  Primer
cagggactcagtactgagtccctg

SEQ ID NO: 2175 - DNA, 24 bp, Artificial sequence
  Primer
ccaggactcagtactgagtcctgg

SEQ ID NO: 2176 - DNA, 24 bp, Artificial sequence
  Primer
ccgagactcagtactgagtctcgg

SEQ ID NO: 2177 - DNA, 24 bp, Artificial sequence
  Primer
tcgggactcagtactgagtcccga

SEQ ID NO: 2178 - DNA, 24 bp, Artificial sequence
  Primer
ctgggactcagtactgagtcccag

SEQ ID NO: 2179 - DNA, 24 bp, Artificial sequence
  Primer
cctggactcagtactgagtccagg

SEQ ID NO: 2180 - DNA, 24 bp, Artificial sequence
  Primer
ccgtgactcagtactgagtcacgg

SEQ ID NO: 2181 - DNA, 24 bp, Artificial sequence
  Primer
cggcgactcagtactgagtcgccg

SEQ ID NO: 2182 - DNA, 24 bp, Artificial sequence
  Primer
cagcgactcagtactgagtcgctg

SEQ ID NO: 2183 - DNA, 24 bp, Artificial sequence
  Primer
cgacgactcagtactgagtcgtcg

SEQ ID NO: 2184 - DNA, 24 bp, Artificial sequence
  Primer
cggagactcagtactgagtctccg

SEQ ID NO: 2185 - DNA, 24 bp, Artificial sequence
  Primer
ctgcgactcagtactgagtcgcag

SEQ ID NO: 2186 - DNA, 24 bp, Artificial sequence
  Primer
cggtgactcagtactgagtcaccg

SEQ ID NO: 2187 - DNA, 24 bp, Artificial sequence
  Primer
cacggactcagtactgagtccgtg

SEQ ID NO: 2188 - DNA, 24 bp, Artificial sequence
  Primer
cccagactcagtactgagtctggg

SEQ ID NO: 2189 - DNA, 24 bp, Artificial sequence
  Primer
ctcggactcagtactgagtccgag

SEQ ID NO: 2190 - DNA, 24 bp, Artificial sequence
  Primer
ccctgactcagtactgagtcaggg

SEQ ID NO: 2191 - DNA, 24 bp, Artificial sequence
  Primer
ccacgactcagtactgagtcgtgg

SEQ ID NO: 2192 - DNA, 24 bp, Artificial sequence
  Primer
agccgactcagtactgagtcggct

SEQ ID NO: 2193 - DNA, 24 bp, Artificial sequence
  Primer
tgccgactcagtactgagtcggca

SEQ ID NO: 2194 - DNA, 24 bp, Artificial sequence
  Primer
gcgagactcagtactgagtctcgc

SEQ ID NO: 2195 - DNA, 24 bp, Artificial sequence
  Primer
gcgtgactcagtactgagtcacgc

SEQ ID NO: 2196 - DNA, 24 bp, Artificial sequence
  Primer
gcaggactcagtactgagtcctgc

SEQ ID NO: 2197 - DNA, 24 bp, Artificial sequence
  Primer
gctggactcagtactgagtccagc

SEQ ID NO: 2198 - DNA, 24 bp, Artificial sequence
  Primer
cgaggactcagtactgagtcctcg

SEQ ID NO: 2199 - DNA, 24 bp, Artificial sequence
  Primer
cgtggactcagtactgagtccacg

SEQ ID NO: 2200 - DNA, 24 bp, Artificial sequence
  Primer
caccgactcagtactgagtcggtg

SEQ ID NO: 2201 - DNA, 24 bp, Artificial sequence
  Primer
ctccgactcagtactgagtcggag

SEQ ID NO: 2202 - DNA, 24 bp, Artificial sequence
  Primer
gcgggactcagtactgagtcccgc

SEQ ID NO: 2203 - DNA, 24 bp, Artificial sequence
  Primer
gagggactcagtactgagtccctc

SEQ ID NO: 2204 - DNA, 24 bp, Artificial sequence
  Primer
gtgggactcagtactgagtcccac

SEQ ID NO: 2205 - DNA, 24 bp, Artificial sequence
  Primer
  misc_feature (1)..(4): n is a, c, g, or t
  misc_feature (21)..(24): n is a, c, g, or t
nnnngactcaggcctgagtcnnnn

SEQ ID NO: 2206 - DNA, 24 bp, Artificial sequence
  Primer
ggcggactcaggcctgagtccgcc

SEQ ID NO: 2207 - DNA, 24 bp, Artificial sequence
  Primer
agcggactcaggcctgagtccgct

SEQ ID NO: 2208 - DNA, 24 bp, Artificial sequence
  Primer
gacggactcaggcctgagtccgtc

SEQ ID NO: 2209 - DNA, 24 bp, Artificial sequence
  Primer
ggaggactcaggcctgagtcctcc

SEQ ID NO: 2210 - DNA, 24 bp, Artificial sequence
  Primer
ggcagactcaggcctgagtctgcc

SEQ ID NO: 2211 - DNA, 24 bp, Artificial sequence
  Primer
tgcggactcaggcctgagtccgca

SEQ ID NO: 2212 - DNA, 24 bp, Artificial sequence
  Primer
gtcggactcaggcctgagtccgac

SEQ ID NO: 2213 - DNA, 24 bp, Artificial sequence
  Primer
ggtggactcaggcctgagtccacc

SEQ ID NO: 2214 - DNA, 24 bp, Artificial sequence
  Primer
ggctgactcaggcctgagtcagcc

SEQ ID NO: 2215 - DNA, 24 bp, Artificial sequence
  Primer
gcccgactcaggcctgagtcgggc

SEQ ID NO: 2216 - DNA, 24 bp, Artificial sequence
  Primer
acccgactcaggcctgagtcgggt

SEQ ID NO: 2217 - DNA, 24 bp, Artificial sequence
  Primer
gaccgactcaggcctgagtcggtc

SEQ ID NO: 2218 - DNA, 24 bp, Artificial sequence
  Primer
gcacgactcaggcctgagtcgtgc

SEQ ID NO: 2219 - DNA, 24 bp, Artificial sequence
  Primer
gccagactcaggcctgagtctggc

SEQ ID NO: 2220 - DNA, 24 bp, Artificial sequence
  Primer
tcccgactcaggcctgagtcggga

SEQ ID NO: 2221 - DNA, 24 bp, Artificial sequence
  Primer
gtccgactcaggcctgagtcggac

SEQ ID NO: 2222 - DNA, 24 bp, Artificial sequence
  Primer
gcctgactcaggcctgagtcaggc

SEQ ID NO: 2223 - DNA, 24 bp, Artificial sequence
  Primer
gggcgactcaggcctgagtcgccc

SEQ ID NO: 2224 - DNA, 24 bp, Artificial sequence
  Primer
aggcgactcaggcctgagtcgcct

SEQ ID NO: 2225 - DNA, 24 bp, Artificial sequence
  Primer
gagcgactcaggcctgagtcgctc

SEQ ID NO: 2226 - DNA, 24 bp, Artificial sequence
  Primer
ggacgactcaggcctgagtcgtcc

SEQ ID NO: 2227 - DNA, 24 bp, Artificial sequence
  Primer
gggagactcaggcctgagtctccc

SEQ ID NO: 2228 - DNA, 24 bp, Artificial sequence
  Primer
tggcgactcaggcctgagtcgcca

SEQ ID NO: 2229 - DNA, 24 bp, Artificial sequence
  Primer
gtgcgactcaggcctgagtcgcac

SEQ ID NO: 2230 - DNA, 24 bp, Artificial sequence
  Primer
gggtgactcaggcctgagtcaccc

SEQ ID NO: 2231 - DNA, 24 bp, Artificial sequence
  Primer
acgggactcaggcctgagtcccgt

SEQ ID NO: 2232 - DNA, 24 bp, Artificial sequence
  Primer
cagggactcaggcctgagtccctg

SEQ ID NO: 2233 - DNA, 24 bp, Artificial sequence
  Primer
ccaggactcaggcctgagtcctgg

SEQ ID NO: 2234 - DNA, 24 bp, Artificial sequence
  Primer
ccgagactcaggcctgagtctcgg

SEQ ID NO: 2235 - DNA, 24 bp, Artificial sequence
  Primer
tcgggactcaggcctgagtcccga

SEQ ID NO: 2236 - DNA, 24 bp, Artificial sequence
  Primer
ctgggactcaggcctgagtcccag

SEQ ID NO: 2237 - DNA, 24 bp, Artificial sequence
  Primer
cctggactcaggcctgagtccagg

SEQ ID NO: 2238 - DNA, 24 bp, Artificial sequence
  Primer
ccgtgactcaggcctgagtcacgg

SEQ ID NO: 2239 - DNA, 24 bp, Artificial sequence
  Primer
cggcgactcaggcctgagtcgccg

SEQ ID NO: 2240 - DNA, 24 bp, Artificial sequence
  Primer
cagcgactcaggcctgagtcgctg

SEQ ID NO: 2241 - DNA, 24 bp, Artificial sequence
  Primer
cgacgactcaggcctgagtcgtcg

SEQ ID NO: 2242 - DNA, 24 bp, Artificial sequence
  Primer
cggagactcaggcctgagtctccg

SEQ ID NO: 2243 - DNA, 24 bp, Artificial sequence
  Primer
ctgcgactcaggcctgagtcgcag

SEQ ID NO: 2244 - DNA, 24 bp, Artificial sequence
  Primer
cggtgactcaggcctgagtcaccg

SEQ ID NO: 2245 - DNA, 24 bp, Artificial sequence
  Primer
cacggactcaggcctgagtccgtg

SEQ ID NO: 2246 - DNA, 24 bp, Artificial sequence
  Primer
cccagactcaggcctgagtctggg

SEQ ID NO: 2247 - DNA, 24 bp, Artificial sequence
  Primer
ctcggactcaggcctgagtccgag

SEQ ID NO: 2248 - DNA, 24 bp, Artificial sequence
  Primer
ccctgactcaggcctgagtcaggg

SEQ ID NO: 2249 - DNA, 24 bp, Artificial sequence
  Primer
ccacgactcaggcctgagtcgtgg

SEQ ID NO: 2250 - DNA, 24 bp, Artificial sequence
  Primer
agccgactcaggcctgagtcggct

SEQ ID NO: 2251 - DNA, 24 bp, Artificial sequence
  Primer
tgccgactcaggcctgagtcggca

SEQ ID NO: 2252 - DNA, 24 bp, Artificial sequence
  Primer
gcgagactcaggcctgagtctcgc

SEQ ID NO: 2253 - DNA, 24 bp, Artificial sequence
  Primer
gcgtgactcaggcctgagtcacgc

SEQ ID NO: 2254 - DNA, 24 bp, Artificial sequence
  Primer
gcaggactcaggcctgagtcctgc

SEQ ID NO: 2255 - DNA, 24 bp, Artificial sequence
  Primer
gctggactcaggcctgagtccagc

SEQ ID NO: 2256 - DNA, 24 bp, Artificial sequence
  Primer
cgaggactcaggcctgagtcctcg

SEQ ID NO: 2257 - DNA, 24 bp, Artificial sequence
  Primer
cgtggactcaggcctgagtccacg

SEQ ID NO: 2258 - DNA, 24 bp, Artificial sequence
  Primer
caccgactcaggcctgagtcggtg

SEQ ID NO: 2259 - DNA, 24 bp, Artificial sequence
  Primer
ctccgactcaggcctgagtcggag

SEQ ID NO: 2260 - DNA, 24 bp, Artificial sequence
  Primer
gcgggactcaggcctgagtcccgc

SEQ ID NO: 2261 - DNA, 24 bp, Artificial sequence
  Primer
gagggactcaggcctgagtccctc

SEQ ID NO: 2262 - DNA, 24 bp, Artificial sequence
  Primer
gtgggactcaggcctgagtcccac

SEQ ID NO: 2263 - DNA, 24 bp, Artificial sequence
  Primer
  misc_feature (1)..(4): n is a, c, g, or t
  misc_feature (21)..(24): n is a, c, g, or t
nnnngactcagcgctgagtcnnnn

SEQ ID NO: 2264 - DNA, 24 bp, Artificial sequence
  Primer
ggcggactcagcgctgagtccgcc

SEQ ID NO: 2265 - DNA, 24 bp, Artificial sequence
  Primer
agcggactcagcgctgagtccgct

SEQ ID NO: 2266 - DNA, 24 bp, Artificial sequence
  Primer
gacggactcagcgctgagtccgtc

SEQ ID NO: 2267 - DNA, 24 bp, Artificial sequence
  Primer
ggaggactcagcgctgagtcctcc

SEQ ID NO: 2268 - DNA, 24 bp, Artificial sequence
  Primer
ggcagactcagcgctgagtctgcc

SEQ ID NO: 2269 - DNA, 24 bp, Artificial sequence
  Primer
tgcggactcagcgctgagtccgca

SEQ ID NO: 2270 - DNA, 24 bp, Artificial sequence
  Primer
gtcggactcagcgctgagtccgac

SEQ ID NO: 2271 - DNA, 24 bp, Artificial sequence
  Primer
ggtggactcagcgctgagtccacc

SEQ ID NO: 2272 - DNA, 24 bp, Artificial sequence
  Primer
ggctgactcagcgctgagtcagcc

SEQ ID NO: 2273 - DNA, 24 bp, Artificial sequence
  Primer
gcccgactcagcgctgagtcgggc

SEQ ID NO: 2274 - DNA, 24 bp, Artificial sequence
  Primer
acccgactcagcgctgagtcgggt

SEQ ID NO: 2275 - DNA, 24 bp, Artificial sequence
  Primer
gaccgactcagcgctgagtcggtc

SEQ ID NO: 2276 - DNA, 24 bp, Artificial sequence
  Primer
gcacgactcagcgctgagtcgtgc

SEQ ID NO: 2277 - DNA, 24 bp, Artificial sequence
  Primer
gccagactcagcgctgagtctggc

SEQ ID NO: 2278 - DNA, 24 bp, Artificial sequence
  Primer
tcccgactcagcgctgagtcggga

SEQ ID NO: 2279 - DNA, 24 bp, Artificial sequence
  Primer
gtccgactcagcgctgagtcggac

SEQ ID NO: 2280 - DNA, 24 bp, Artificial sequence
  Primer
gcctgactcagcgctgagtcaggc

SEQ ID NO: 2281 - DNA, 24 bp, Artificial sequence
  Primer
gggcgactcagcgctgagtcgccc

SEQ ID NO: 2282 - DNA, 24 bp, Artificial sequence
  Primer
aggcgactcagcgctgagtcgcct

SEQ ID NO: 2283 - DNA, 24 bp, Artificial sequence
  Primer
gagcgactcagcgctgagtcgctc

SEQ ID NO: 2284 - DNA, 24 bp, Artificial sequence
  Primer
ggacgactcagcgctgagtcgtcc

SEQ ID NO: 2285 - DNA, 24 bp, Artificial sequence
  Primer
gggagactcagcgctgagtctccc

SEQ ID NO: 2286 - DNA, 24 bp, Artificial sequence
  Primer
tggcgactcagcgctgagtcgcca

SEQ ID NO: 2287 - DNA, 24 bp, Artificial sequence
  Primer
gtgcgactcagcgctgagtcgcac

SEQ ID NO: 2288 - DNA, 24 bp, Artificial sequence
  Primer
gggtgactcagcgctgagtcaccc

SEQ ID NO: 2289 - DNA, 24 bp, Artificial sequence
  Primer
acgggactcagcgctgagtcccgt

SEQ ID NO: 2290 - DNA, 24 bp, Artificial sequence
  Primer
cagggactcagcgctgagtccctg

SEQ ID NO: 2291 - DNA, 24 bp, Artificial sequence
  Primer
ccaggactcagcgctgagtcctgg

SEQ ID NO: 2292 - DNA, 24 bp, Artificial sequence
  Primer
ccgagactcagcgctgagtctcgg

SEQ ID NO: 2293 - DNA, 24 bp, Artificial sequence
  Primer
tcgggactcagcgctgagtcccga

SEQ ID NO: 2294 - DNA, 24 bp, Artificial sequence
  Primer
ctgggactcagcgctgagtcccag

SEQ ID NO: 2295 - DNA, 24 bp, Artificial sequence
  Primer
cctggactcagcgctgagtccagg

SEQ ID NO: 2296 - DNA, 24 bp, Artificial sequence
  Primer
ccgtgactcagcgctgagtcacgg

SEQ ID NO: 2297 - DNA, 24 bp, Artificial sequence
  Primer
cggcgactcagcgctgagtcgccg

SEQ ID NO: 2298 - DNA, 24 bp, Artificial sequence
  Primer
cagcgactcagcgctgagtcgctg

SEQ ID NO: 2299 - DNA, 24 bp, Artificial sequence
  Primer
cgacgactcagcgctgagtcgtcg

SEQ ID NO: 2300 - DNA, 24 bp, Artificial sequence
  Primer
cggagactcagcgctgagtctccg

SEQ ID NO: 2301 - DNA, 24 bp, Artificial sequence
  Primer
ctgcgactcagcgctgagtcgcag

SEQ ID NO: 2302 - DNA, 24 bp, Artificial sequence
  Primer
cggtgactcagcgctgagtcaccg

SEQ ID NO: 2303 - DNA, 24 bp, Artificial sequence
  Primer
cacggactcagcgctgagtccgtg

SEQ ID NO: 2304 - DNA, 24 bp, Artificial sequence
  Primer
cccagactcagcgctgagtctggg

SEQ ID NO: 2305 - DNA, 24 bp, Artificial sequence
  Primer
ctcggactcagcgctgagtccgag

SEQ ID NO: 2306 - DNA, 24 bp, Artificial sequence
  Primer
ccctgactcagcgctgagtcaggg

SEQ ID NO: 2307 - DNA, 24 bp, Artificial sequence
  Primer
ccacgactcagcgctgagtcgtgg

SEQ ID NO: 2308 - DNA, 24 bp, Artificial sequence
  Primer
agccgactcagcgctgagtcggct

SEQ ID NO: 2309 - DNA, 24 bp, Artificial sequence
  Primer
tgccgactcagcgctgagtcggca

SEQ ID NO: 2310 - DNA, 24 bp, Artificial sequence
  Primer
gcgagactcagcgctgagtctcgc

SEQ ID NO: 2311 - DNA, 24 bp, Artificial sequence
  Primer
gcgtgactcagcgctgagtcacgc

SEQ ID NO: 2312 - DNA, 24 bp, Artificial sequence
  Primer
gcaggactcagcgctgagtcctgc

SEQ ID NO: 2313 - DNA, 24 bp, Artificial sequence
  Primer
gctggactcagcgctgagtccagc

SEQ ID NO: 2314 - DNA, 24 bp, Artificial sequence
  Primer
cgaggactcagcgctgagtcctcg

SEQ ID NO: 2315 - DNA, 24 bp, Artificial sequence
  Primer
cgtggactcagcgctgagtccacg

SEQ ID NO: 2316 - DNA, 24 bp, Artificial sequence
  Primer
caccgactcagcgctgagtcggtg

SEQ ID NO: 2317 - DNA, 24 bp, Artificial sequence
  Primer
ctccgactcagcgctgagtcggag

SEQ ID NO: 2318 - DNA, 24 bp, Artificial sequence
  Primer
gcgggactcagcgctgagtcccgc

SEQ ID NO: 2319 - DNA, 24 bp, Artificial sequence
  Primer
gagggactcagcgctgagtccctc

SEQ ID NO: 2320 - DNA, 24 bp, Artificial sequence
  Primer
gtgggactcagcgctgagtcccac

SEQ ID NO: 2321 - DNA, 24 bp, Artificial sequence
  Primer
  misc_feature (1)..(4): n is a, c, g, or t
  misc_feature (21)..(24): n is a, c, g, or t
nnnngactcaaatttgagtcnnnn

SEQ ID NO: 2322 - DNA, 24 bp, Artificial sequence
  Primer
ggcggactcaaatttgagtccgcc

SEQ ID NO: 2323 - DNA, 24 bp, Artificial sequence
  Primer
agcggactcaaatttgagtccgct

SEQ ID NO: 2324 - DNA, 24 bp, Artificial sequence
  Primer
gacggactcaaatttgagtccgtc

SEQ ID NO: 2325 - DNA, 24 bp, Artificial sequence
  Primer
ggaggactcaaatttgagtcctcc

SEQ ID NO: 2326 - DNA, 24 bp, Artificial sequence
  Primer
ggcagactcaaatttgagtctgcc

SEQ ID NO: 2327 - DNA, 24 bp, Artificial sequence
  Primer
tgcggactcaaatttgagtccgca

SEQ ID NO: 2328 - DNA, 24 bp, Artificial sequence
  Primer
gtcggactcaaatttgagtccgac

SEQ ID NO: 2329 - DNA, 24 bp, Artificial sequence
  Primer
ggtggactcaaatttgagtccacc

SEQ ID NO: 2330 - DNA, 24 bp, Artificial sequence
  Primer
ggctgactcaaatttgagtcagcc

SEQ ID NO: 2331 - DNA, 24 bp, Artificial sequence
  Primer
gcccgactcaaatttgagtcgggc

SEQ ID NO: 2332 - DNA, 24 bp, Artificial sequence
  Primer
acccgactcaaatttgagtcgggt

SEQ ID NO: 2333 - DNA, 24 bp, Artificial sequence
  Primer
gaccgactcaaatttgagtcggtc

SEQ ID NO: 2334 - DNA, 24 bp, Artificial sequence
  Primer
gcacgactcaaatttgagtcgtgc

SEQ ID NO: 2335 - DNA, 24 bp, Artificial sequence
  Primer
gccagactcaaatttgagtctggc

SEQ ID NO: 2336 - DNA, 24 bp, Artificial sequence
  Primer
tcccgactcaaatttgagtcggga

SEQ ID NO: 2337 - DNA, 24 bp, Artificial sequence
  Primer
gtccgactcaaatttgagtcggac

SEQ ID NO: 2338 - DNA, 24 bp, Artificial sequence
  Primer
gcctgactcaaatttgagtcaggc

SEQ ID NO: 2339 - DNA, 24 bp, Artificial sequence
  Primer
gggcgactcaaatttgagtcgccc

SEQ ID NO: 2340 - DNA, 24 bp, Artificial sequence
  Primer
aggcgactcaaatttgagtcgcct

SEQ ID NO: 2341 - DNA, 24 bp, Artificial sequence
  Primer
gagcgactcaaatttgagtcgctc

SEQ ID NO: 2342 - DNA, 24 bp, Artificial sequence
  Primer
ggacgactcaaatttgagtcgtcc

SEQ ID NO: 2343 - DNA, 24 bp, Artificial sequence
  Primer
gggagactcaaatttgagtctccc

SEQ ID NO: 2344 - DNA, 24 bp, Artificial sequence
  Primer
tggcgactcaaatttgagtcgcca

SEQ ID NO: 2345 - DNA, 24 bp, Artificial sequence
  Primer
gtgcgactcaaatttgagtcgcac

SEQ ID NO: 2346 - DNA, 24 bp, Artificial sequence
  Primer
gggtgactcaaatttgagtcaccc

SEQ ID NO: 2347 - DNA, 24 bp, Artificial sequence
  Primer
acgggactcaaatttgagtcccgt

SEQ ID NO: 2348 - DNA, 24 bp, Artificial sequence
  Primer
cagggactcaaatttgagtccctg

SEQ ID NO: 2349 - DNA, 24 bp, Artificial sequence
  Primer
ccaggactcaaatttgagtcctgg

SEQ ID NO: 2350 - DNA, 24 bp, Artificial sequence
  Primer
ccgagactcaaatttgagtctcgg

SEQ ID NO: 2351 - DNA, 24 bp, Artificial sequence
  Primer
tcgggactcaaatttgagtcccga

SEQ ID NO: 2352 - DNA, 24 bp, Artificial sequence
  Primer
ctgggactcaaatttgagtcccag

SEQ ID NO: 2353 - DNA, 24 bp, Artificial sequence
  Primer
cctggactcaaatttgagtccagg

SEQ ID NO: 2354 - DNA, 24 bp, Artificial sequence
  Primer
ccgtgactcaaatttgagtcacgg

SEQ ID NO: 2355 - DNA, 24 bp, Artificial sequence
  Primer
cggcgactcaaatttgagtcgccg

SEQ ID NO: 2356 - DNA, 24 bp, Artificial sequence
  Primer
cagcgactcaaatttgagtcgctg

SEQ ID NO: 2357 - DNA, 24 bp, Artificial sequence
  Primer
cgacgactcaaatttgagtcgtcg

SEQ ID NO: 2358 - DNA, 24 bp, Artificial sequence
  Primer
cggagactcaaatttgagtctccg

SEQ ID NO: 2359 - DNA, 24 bp, Artificial sequence
  Primer
ctgcgactcaaatttgagtcgcag

SEQ ID NO: 2360 - DNA, 24 bp, Artificial sequence
  Primer
cggtgactcaaatttgagtcaccg

SEQ ID NO: 2361 - DNA, 24 bp, Artificial sequence
  Primer
cacggactcaaatttgagtccgtg

SEQ ID NO: 2362 - DNA, 24 bp, Artificial sequence
  Primer
cccagactcaaatttgagtctggg

SEQ ID NO: 2363 - DNA, 24 bp, Artificial sequence
  Primer
ctcggactcaaatttgagtccgag

SEQ ID NO: 2364 - DNA, 24 bp, Artificial sequence
  Primer
ccctgactcaaatttgagtcaggg

SEQ ID NO: 2365 - DNA, 24 bp, Artificial sequence
  Primer
ccacgactcaaatttgagtcgtgg

SEQ ID NO: 2366 - DNA, 24 bp, Artificial sequence
  Primer
agccgactcaaatttgagtcggct

SEQ ID NO: 2367 - DNA, 24 bp, Artificial sequence
  Primer
tgccgactcaaatttgagtcggca

SEQ ID NO: 2368 - DNA, 24 bp, Artificial sequence
  Primer
gcgagactcaaatttgagtctcgc

SEQ ID NO: 2369 - DNA, 24 bp, Artificial sequence
  Primer
gcgtgactcaaatttgagtcacgc

SEQ ID NO: 2370 - DNA, 24 bp, Artificial sequence
  Primer
gcaggactcaaatttgagtcctgc

SEQ ID NO: 2371 - DNA, 24 bp, Artificial sequence
  Primer
gctggactcaaatttgagtccagc

SEQ ID NO: 2372 - DNA, 24 bp, Artificial sequence
  Primer
cgaggactcaaatttgagtcctcg

SEQ ID NO: 2373 - DNA, 24 bp, Artificial sequence
  Primer
cgtggactcaaatttgagtccacg

SEQ ID NO: 2374 - DNA, 24 bp, Artificial sequence
  Primer
caccgactcaaatttgagtcggtg

SEQ ID NO: 2375 - DNA, 24 bp, Artificial sequence
  Primer
ctccgactcaaatttgagtcggag

SEQ ID NO: 2376 - DNA, 24 bp, Artificial sequence
  Primer
gcgggactcaaatttgagtcccgc

SEQ ID NO: 2377 - DNA, 24 bp, Artificial sequence
  Primer
gagggactcaaatttgagtccctc

SEQ ID NO: 2378 - DNA, 24 bp, Artificial sequence
  Primer
gtgggactcaaatttgagtcccac

SEQ ID NO: 2379 - DNA, 24 bp, Artificial sequence
  Primer
  misc_feature (1)..(4): n is a, c, g, or t
  misc_feature (21)..(24): n is a, c, g, or t
nnnngactcaatattgagtcnnnn

SEQ ID NO: 2380 - DNA, 24 bp, Artificial sequence
  Primer
ggcggactcaatattgagtccgcc

SEQ ID NO: 2381 - DNA, 24 bp, Artificial sequence
  Primer
agcggactcaatattgagtccgct

SEQ ID NO: 2382 - DNA, 24 bp, Artificial sequence
  Primer
gacggactcaatattgagtccgtc

SEQ ID NO: 2383 - DNA, 24 bp, Artificial sequence
  Primer
ggaggactcaatattgagtcctcc

SEQ ID NO: 2384 - DNA, 24 bp, Artificial sequence
  Primer
ggcagactcaatattgagtctgcc

SEQ ID NO: 2385 - DNA, 24 bp, Artificial sequence
  Primer
tgcggactcaatattgagtccgca

SEQ ID NO: 2386 - DNA, 24 bp, Artificial sequence
  Primer
gtcggactcaatattgagtccgac

SEQ ID NO: 2387 - DNA, 24 bp, Artificial sequence
  Primer
ggtggactcaatattgagtccacc

SEQ ID NO: 2388 - DNA, 24 bp, Artificial sequence
  Primer
ggctgactcaatattgagtcagcc

SEQ ID NO: 2389 - DNA, 24 bp, Artificial sequence
  Primer
gcccgactcaatattgagtcgggc

SEQ ID NO: 2390 - DNA, 24 bp, Artificial sequence
  Primer
acccgactcaatattgagtcgggt

SEQ ID NO: 2391 - DNA, 24 bp, Artificial sequence
  Primer
gaccgactcaatattgagtcggtc

SEQ ID NO: 2392 - DNA, 24 bp, Artificial sequence
  Primer
gcacgactcaatattgagtcgtgc

SEQ ID NO: 2393 - DNA, 24 bp, Artificial sequence
  Primer
gccagactcaatattgagtctggc

SEQ ID NO: 2394 - DNA, 24 bp, Artificial sequence
  Primer
tcccgactcaatattgagtcggga

SEQ ID NO: 2395 - DNA, 24 bp, Artificial sequence
  Primer
gtccgactcaatattgagtcggac

SEQ ID NO: 2396 - DNA, 24 bp, Artificial sequence
  Primer
gcctgactcaatattgagtcaggc

SEQ ID NO: 2397 - DNA, 24 bp, Artificial sequence
  Primer
gggcgactcaatattgagtcgccc

SEQ ID NO: 2398 - DNA, 24 bp, Artificial sequence
  Primer
aggcgactcaatattgagtcgcct

SEQ ID NO: 2399 - DNA, 24 bp, Artificial sequence
  Primer
gagcgactcaatattgagtcgctc

SEQ ID NO: 2400 - DNA, 24 bp, Artificial sequence
  Primer
ggacgactcaatattgagtcgtcc

SEQ ID NO: 2401 - DNA, 24 bp, Artificial sequence
  Primer
gggagactcaatattgagtctccc

SEQ ID NO: 2402 - DNA, 24 bp, Artificial sequence
  Primer
tggcgactcaatattgagtcgcca

SEQ ID NO: 2403 - DNA, 24 bp, Artificial sequence
  Primer
gtgcgactcaatattgagtcgcac

SEQ ID NO: 2404 - DNA, 24 bp, Artificial sequence
  Primer
gggtgactcaatattgagtcaccc

SEQ ID NO: 2405 - DNA, 24 bp, Artificial sequence
  Primer
acgggactcaatattgagtcccgt

SEQ ID NO: 2406 - DNA, 24 bp, Artificial sequence
  Primer
cagggactcaatattgagtccctg

SEQ ID NO: 2407 - DNA, 24 bp, Artificial sequence
  Primer
ccaggactcaatattgagtcctgg

SEQ ID NO: 2408 - DNA, 24 bp, Artificial sequence
  Primer
ccgagactcaatattgagtctcgg

SEQ ID NO: 2409 - DNA, 24 bp, Artificial sequence
  Primer
tcgggactcaatattgagtcccga

SEQ ID NO: 2410 - DNA, 24 bp, Artificial sequence
  Primer
ctgggactcaatattgagtcccag

SEQ ID NO: 2411 - DNA, 24 bp, Artificial sequence
  Primer
cctggactcaatattgagtccagg

SEQ ID NO: 2412 - DNA, 24 bp, Artificial sequence
  Primer
ccgtgactcaatattgagtcacgg

SEQ ID NO: 2413 - DNA, 24 bp, Artificial sequence
  Primer
cggcgactcaatattgagtcgccg

SEQ ID NO: 2414 - DNA, 24 bp, Artificial sequence
  Primer
cagcgactcaatattgagtcgctg

SEQ ID NO: 2415 - DNA, 24 bp, Artificial sequence
  Primer
cgacgactcaatattgagtcgtcg

SEQ ID NO: 2416 - DNA, 24 bp, Artificial sequence
  Primer
cggagactcaatattgagtctccg

SEQ ID NO: 2417 - DNA, 24 bp, Artificial sequence
  Primer
ctgcgactcaatattgagtcgcag

SEQ ID NO: 2418 - DNA, 24 bp, Artificial sequence
  Primer
cggtgactcaatattgagtcaccg

SEQ ID NO: 2419 - DNA, 24 bp, Artificial sequence
  Primer
cacggactcaatattgagtccgtg

SEQ ID NO: 2420 - DNA, 24 bp, Artificial sequence
  Primer
cccagactcaatattgagtctggg

SEQ ID NO: 2421 - DNA, 24 bp, Artificial sequence
  Primer
ctcggactcaatattgagtccgag

SEQ ID NO: 2422 - DNA, 24 bp, Artificial sequence
  Primer
ccctgactcaatattgagtcaggg

SEQ ID NO: 2423 - DNA, 24 bp, Artificial sequence
  Primer
ccacgactcaatattgagtcgtgg

SEQ ID NO: 2424 - DNA, 24 bp, Artificial sequence
  Primer
agccgactcaatattgagtcggct

SEQ ID NO: 2425 - DNA, 24 bp, Artificial sequence
  Primer
tgccgactcaatattgagtcggca

SEQ ID NO: 2426 - DNA, 24 bp, Artificial sequence
  Primer
gcgagactcaatattgagtctcgc

SEQ ID NO: 2427 - DNA, 24 bp, Artificial sequence
  Primer
gcgtgactcaatattgagtcacgc

SEQ ID NO: 2428 - DNA, 24 bp, Artificial sequence
  Primer
gcaggactcaatattgagtcctgc

SEQ ID NO: 2429 - DNA, 24 bp, Artificial sequence
  Primer
gctggactcaatattgagtccagc

SEQ ID NO: 2430 - DNA, 24 bp, Artificial sequence
  Primer
cgaggactcaatattgagtcctcg

SEQ ID NO: 2431 - DNA, 24 bp, Artificial sequence
  Primer
cgtggactcaatattgagtccacg

SEQ ID NO: 2432 - DNA, 24 bp, Artificial sequence
  Primer
caccgactcaatattgagtcggtg

SEQ ID NO: 2433 - DNA, 24 bp, Artificial sequence
  Primer
ctccgactcaatattgagtcggag

SEQ ID NO: 2434 - DNA, 24 bp, Artificial sequence
  Primer
gcgggactcaatattgagtcccgc

SEQ ID NO: 2435 - DNA, 24 bp, Artificial sequence
  Primer
gagggactcaatattgagtccctc

SEQ ID NO: 2436 - DNA, 24 bp, Artificial sequence
  Primer
gtgggactcaatattgagtcccac

SEQ ID NO: 2437 - DNA, 24 bp, Artificial sequence
  Primer
  misc_feature (1)..(4): n is a, c, g, or t
  misc_feature (21)..(24): n is a, c, g, or t
nnnngactcaagcttgagtcnnnn

SEQ ID NO: 2438 - DNA, 24 bp, Artificial sequence
  Primer
ggcggactcaagcttgagtccgcc

SEQ ID NO: 2439 - DNA, 24 bp, Artificial sequence
  Primer
agcggactcaagcttgagtccgct

SEQ ID NO: 2440 - DNA, 24 bp, Artificial sequence
  Primer
gacggactcaagcttgagtccgtc

SEQ ID NO: 2441 - DNA, 24 bp, Artificial sequence
  Primer
ggaggactcaagcttgagtcctcc

SEQ ID NO: 2442 - DNA, 24 bp, Artificial sequence
  Primer
ggcagactcaagcttgagtctgcc

SEQ ID NO: 2443 - DNA, 24 bp, Artificial sequence
  Primer
tgcggactcaagcttgagtccgca

SEQ ID NO: 2444 - DNA, 24 bp, Artificial sequence
  Primer
gtcggactcaagcttgagtccgac

SEQ ID NO: 2445 - DNA, 24 bp, Artificial sequence
  Primer
ggtggactcaagcttgagtccacc

SEQ ID NO: 2446 - DNA, 24 bp, Artificial sequence
  Primer
ggctgactcaagcttgagtcagcc

SEQ ID NO: 2447 - DNA, 24 bp, Artificial sequence
  Primer
gcccgactcaagcttgagtcgggc

SEQ ID NO: 2448 - DNA, 24 bp, Artificial sequence
  Primer
acccgactcaagcttgagtcgggt

SEQ ID NO: 2449 - DNA, 24 bp, Artificial sequence
  Primer
gaccgactcaagcttgagtcggtc

SEQ ID NO: 2450 - DNA, 24 bp, Artificial sequence
  Primer
gcacgactcaagcttgagtcgtgc

SEQ ID NO: 2451 - DNA, 24 bp, Artificial sequence
  Primer
gccagactcaagcttgagtctggc

SEQ ID NO: 2452 - DNA, 24 bp, Artificial sequence
  Primer
tcccgactcaagcttgagtcggga

SEQ ID NO: 2453 - DNA, 24 bp, Artificial sequence
  Primer
gtccgactcaagcttgagtcggac

SEQ ID NO: 2454 - DNA, 24 bp, Artificial sequence
  Primer
gcctgactcaagcttgagtcaggc

SEQ ID NO: 2455 - DNA, 24 bp, Artificial sequence
  Primer
gggcgactcaagcttgagtcgccc

SEQ ID NO: 2456 - DNA, 24 bp, Artificial sequence
  Primer
aggcgactcaagcttgagtcgcct

SEQ ID NO: 2457 - DNA, 24 bp, Artificial sequence
  Primer
gagcgactcaagcttgagtcgctc

SEQ ID NO: 2458 - DNA, 24 bp, Artificial sequence
  Primer
ggacgactcaagcttgagtcgtcc

SEQ ID NO: 2459 - DNA, 24 bp, Artificial sequence
  Primer
gggagactcaagcttgagtctccc

SEQ ID NO: 2460 - DNA, 24 bp, Artificial sequence
  Primer
tggcgactcaagcttgagtcgcca

SEQ ID NO: 2461 - DNA, 24 bp, Artificial sequence
  Primer
gtgcgactcaagcttgagtcgcac

SEQ ID NO: 2462 - DNA, 24 bp, Artificial sequence
  Primer
gggtgactcaagcttgagtcaccc

SEQ ID NO: 2463 - DNA, 24 bp, Artificial sequence
  Primer
acgggactcaagcttgagtcccgt

SEQ ID NO: 2464 - DNA, 24 bp, Artificial sequence
  Primer
cagggactcaagcttgagtccctg

SEQ ID NO: 2465 - DNA, 24 bp, Artificial sequence
  Primer
ccaggactcaagcttgagtcctgg

SEQ ID NO: 2466 - DNA, 24 bp, Artificial sequence
  Primer
ccgagactcaagcttgagtctcgg

SEQ ID NO: 2467 - DNA, 24 bp, Artificial sequence
  Primer
tcgggactcaagcttgagtcccga

SEQ ID NO: 2468 - DNA, 24 bp, Artificial sequence
  Primer
ctgggactcaagcttgagtcccag

SEQ ID NO: 2469 - DNA, 24 bp, Artificial sequence
  Primer
cctggactcaagcttgagtccagg

SEQ ID NO: 2470 - DNA, 24 bp, Artificial sequence
  Primer
ccgtgactcaagcttgagtcacgg

SEQ ID NO: 2471 - DNA, 24 bp, Artificial sequence
  Primer
cggcgactcaagcttgagtcgccg

SEQ ID NO: 2472 - DNA, 24 bp, Artificial sequence
  Primer
cagcgactcaagcttgagtcgctg

SEQ ID NO: 2473 - DNA, 24 bp, Artificial sequence
  Primer
cgacgactcaagcttgagtcgtcg

SEQ ID NO: 2474 - DNA, 24 bp, Artificial sequence
  Primer
cggagactcaagcttgagtctccg

SEQ ID NO: 2475 - DNA, 24 bp, Artificial sequence
  Primer
ctgcgactcaagcttgagtcgcag

SEQ ID NO: 2476 - DNA, 24 bp, Artificial sequence
  Primer
cggtgactcaagcttgagtcaccg

SEQ ID NO: 2477 - DNA, 24 bp, Artificial sequence
  Primer
cacggactcaagcttgagtccgtg

SEQ ID NO: 2478 - DNA, 24 bp, Artificial sequence
  Primer
cccagactcaagcttgagtctggg

SEQ ID NO: 2479 - DNA, 24 bp, Artificial sequence
  Primer
ctcggactcaagcttgagtccgag

SEQ ID NO: 2480 - DNA, 24 bp, Artificial sequence
  Primer
ccctgactcaagcttgagtcaggg

SEQ ID NO: 2481 - DNA, 24 bp, Artificial sequence
  Primer
ccacgactcaagcttgagtcgtgg

SEQ ID NO: 2482 - DNA, 24 bp, Artificial sequence
  Primer
agccgactcaagcttgagtcggct

SEQ ID NO: 2483 - DNA, 24 bp, Artificial sequence
  Primer
tgccgactcaagcttgagtcggca

SEQ ID NO: 2484 - DNA, 24 bp, Artificial sequence
  Primer
gcgagactcaagcttgagtctcgc

SEQ ID NO: 2485 - DNA, 24 bp, Artificial sequence
  Primer
gcgtgactcaagcttgagtcacgc

SEQ ID NO: 2486 - DNA, 24 bp, Artificial sequence
  Primer
gcaggactcaagcttgagtcctgc

SEQ ID NO: 2487 - DNA, 24 bp, Artificial sequence
  Primer
gctggactcaagcttgagtccagc

SEQ ID NO: 2488 - DNA, 24 bp, Artificial sequence
  Primer
cgaggactcaagcttgagtcctcg

SEQ ID NO: 2489 - DNA, 24 bp, Artificial sequence
  Primer
cgtggactcaagcttgagtccacg

SEQ ID NO: 2490 - DNA, 24 bp, Artificial sequence
  Primer
caccgactcaagcttgagtcggtg

SEQ ID NO: 2491 - DNA, 24 bp, Artificial sequence
  Primer
ctccgactcaagcttgagtcggag

SEQ ID NO: 2492 - DNA, 24 bp, Artificial sequence
  Primer
gcgggactcaagcttgagtcccgc

SEQ ID NO: 2493 - DNA, 24 bp, Artificial sequence
  Primer
gagggactcaagcttgagtccctc

SEQ ID NO: 2494 - DNA, 24 bp, Artificial sequence
  Primer
gtgggactcaagcttgagtcccac

SEQ ID NO: 2495 - DNA, 24 bp, Artificial sequence
  Primer
  misc_feature (1)..(4): n is a, c, g, or t
  misc_feature (21)..(24): n is a, c, g, or t
nnnngactcaacgttgagtcnnnn

SEQ ID NO: 2496 - DNA, 24 bp, Artificial sequence
  Primer
ggcggactcaacgttgagtccgcc

SEQ ID NO: 2497 - DNA, 24 bp, Artificial sequence
  Primer
agcggactcaacgttgagtccgct

SEQ ID NO: 2498 - DNA, 24 bp, Artificial sequence
  Primer
gacggactcaacgttgagtccgtc

SEQ ID NO: 2499 - DNA, 24 bp, Artificial sequence
  Primer
ggaggactcaacgttgagtcctcc

SEQ ID NO: 2500 - DNA, 24 bp, Artificial sequence
  Primer
ggcagactcaacgttgagtctgcc

SEQ ID NO: 2501 - DNA, 24 bp, Artificial sequence
  Primer
tgcggactcaacgttgagtccgca

SEQ ID NO: 2502 - DNA, 24 bp, Artificial sequence
  Primer
gtcggactcaacgttgagtccgac

SEQ ID NO: 2503 - DNA, 24 bp, Artificial sequence
  Primer
ggtggactcaacgttgagtccacc

SEQ ID NO: 2504 - DNA, 24 bp, Artificial sequence
  Primer
ggctgactcaacgttgagtcagcc

SEQ ID NO: 2505 - DNA, 24 bp, Artificial sequence
  Primer
gcccgactcaacgttgagtcgggc

SEQ ID NO: 2506 - DNA, 24 bp, Artificial sequence
  Primer
acccgactcaacgttgagtcgggt

SEQ ID NO: 2507 - DNA, 24 bp, Artificial sequence
  Primer
gaccgactcaacgttgagtcggtc

SEQ ID NO: 2508 - DNA, 24 bp, Artificial sequence
  Primer
gcacgactcaacgttgagtcgtgc

SEQ ID NO: 2509 - DNA, 24 bp, Artificial sequence
  Primer
gccagactcaacgttgagtctggc

SEQ ID NO: 2510 - DNA, 24 bp, Artificial sequence
  Primer
tcccgactcaacgttgagtcggga

SEQ ID NO: 2511 - DNA, 24 bp, Artificial sequence
  Primer
gtccgactcaacgttgagtcggac

SEQ ID NO: 2512 - DNA, 24 bp, Artificial sequence
  Primer
gcctgactcaacgttgagtcaggc

SEQ ID NO: 2513 - DNA, 24 bp, Artificial sequence
  Primer
gggcgactcaacgttgagtcgccc

SEQ ID NO: 2514 - DNA, 24 bp, Artificial sequence
  Primer
aggcgactcaacgttgagtcgcct

SEQ ID NO: 2515 - DNA, 24 bp, Artificial sequence
  Primer
gagcgactcaacgttgagtcgctc

SEQ ID NO: 2516 - DNA, 24 bp, Artificial sequence
  Primer
ggacgactcaacgttgagtcgtcc

SEQ ID NO: 2517 - DNA, 24 bp, Artificial sequence
  Primer
gggagactcaacgttgagtctccc

SEQ ID NO: 2518 - DNA, 24 bp, Artificial sequence
  Primer
tggcgactcaacgttgagtcgcca

SEQ ID NO: 2519 - DNA, 24 bp, Artificial sequence
  Primer
gtgcgactcaacgttgagtcgcac

SEQ ID NO: 2520 - DNA, 24 bp, Artificial sequence
  Primer
gggtgactcaacgttgagtcaccc

SEQ ID NO: 2521 - DNA, 24 bp, Artificial sequence
  Primer
acgggactcaacgttgagtcccgt

SEQ ID NO: 2522 - DNA, 24 bp, Artificial sequence
  Primer
cagggactcaacgttgagtccctg

SEQ ID NO: 2523 - DNA, 24 bp, Artificial sequence
  Primer
ccaggactcaacgttgagtcctgg

SEQ ID NO: 2524 - DNA, 24 bp, Artificial sequence
  Primer
ccgagactcaacgttgagtctcgg

SEQ ID NO: 2525 - DNA, 24 bp, Artificial sequence
  Primer
tcgggactcaacgttgagtcccga

SEQ ID NO: 2526 - DNA, 24 bp, Artificial sequence
  Primer
ctgggactcaacgttgagtcccag

SEQ ID NO: 2527 - DNA, 24 bp, Artificial sequence
  Primer
cctggactcaacgttgagtccagg

SEQ ID NO: 2528 - DNA, 24 bp, Artificial sequence
  Primer
ccgtgactcaacgttgagtcacgg

SEQ ID NO: 2529 - DNA, 24 bp, Artificial sequence
  Primer
cggcgactcaacgttgagtcgccg

SEQ ID NO: 2530 - DNA, 24 bp, Artificial sequence
  Primer
cagcgactcaacgttgagtcgctg

SEQ ID NO: 2531 - DNA, 24 bp, Artificial sequence
  Primer
cgacgactcaacgttgagtcgtcg

SEQ ID NO: 2532 - DNA, 24 bp, Artificial sequence
  Primer
cggagactcaacgttgagtctccg

SEQ ID NO: 2533 - DNA, 24 bp, Artificial sequence
  Primer
ctgcgactcaacgttgagtcgcag

SEQ ID NO: 2534 - DNA, 24 bp, Artificial sequence
  Primer
cggtgactcaacgttgagtcaccg

SEQ ID NO: 2535 - DNA, 24 bp, Artificial sequence
  Primer
cacggactcaacgttgagtccgtg

SEQ ID NO: 2536 - DNA, 24 bp, Artificial sequence
  Primer
cccagactcaacgttgagtctggg

SEQ ID NO: 2537 - DNA, 24 bp, Artificial sequence
  Primer
ctcggactcaacgttgagtccgag

SEQ ID NO: 2538 - DNA, 24 bp, Artificial sequence
  Primer
ccctgactcaacgttgagtcaggg

SEQ ID NO: 2539 - DNA, 24 bp, Artificial sequence
  Primer
ccacgactcaacgttgagtcgtgg

SEQ ID NO: 2540 - DNA, 24 bp, Artificial sequence
  Primer
agccgactcaacgttgagtcggct

SEQ ID NO: 2541 - DNA, 24 bp, Artificial sequence
  Primer
tgccgactcaacgttgagtcggca

SEQ ID NO: 2542 - DNA, 24 bp, Artificial sequence
  Primer
gcgagactcaacgttgagtctcgc

SEQ ID NO: 2543 - DNA, 24 bp, Artificial sequence
  Primer
gcgtgactcaacgttgagtcacgc

SEQ ID NO: 2544 - DNA, 24 bp, Artificial sequence
  Primer
gcaggactcaacgttgagtcctgc

SEQ ID NO: 2545 - DNA, 24 bp, Artificial sequence
  Primer
gctggactcaacgttgagtccagc

SEQ ID NO: 2546 - DNA, 24 bp, Artificial sequence
  Primer
cgaggactcaacgttgagtcctcg

SEQ ID NO: 2547 - DNA, 24 bp, Artificial sequence
  Primer
cgtggactcaacgttgagtccacg

SEQ ID NO: 2548 - DNA, 24 bp, Artificial sequence
  Primer
caccgactcaacgttgagtcggtg

SEQ ID NO: 2549 - DNA, 24 bp, Artificial sequence
  Primer
ctccgactcaacgttgagtcggag

SEQ ID NO: 2550 - DNA, 24 bp, Artificial sequence
  Primer
gcgggactcaacgttgagtcccgc

SEQ ID NO: 2551 - DNA, 24 bp, Artificial sequence
  Primer
gagggactcaacgttgagtccctc

SEQ ID NO: 2552 - DNA, 24 bp, Artificial sequence
  Primer
gtgggactcaacgttgagtcccac

SEQ ID NO: 2553 - DNA, 24 bp, Artificial sequence
  Primer
  misc_feature (1)..(4): n is a, c, g, or t
  misc_feature (21)..(24): n is a, c, g, or t
nnnngactctaattagagtcnnnn

SEQ ID NO: 2554 - DNA, 24 bp, Artificial sequence
  Primer
ggcggactctaattagagtccgcc

SEQ ID NO: 2555 - DNA, 24 bp, Artificial sequence
  Primer
agcggactctaattagagtccgct

SEQ ID NO: 2556 - DNA, 24 bp, Artificial sequence
  Primer
gacggactctaattagagtccgtc

SEQ ID NO: 2557 - DNA, 24 bp, Artificial sequence
  Primer
ggaggactctaattagagtcctcc

SEQ ID NO: 2558 - DNA, 24 bp, Artificial sequence
  Primer
ggcagactctaattagagtctgcc

SEQ ID NO: 2559 - DNA, 24 bp, Artificial sequence
  Primer
tgcggactctaattagagtccgca

SEQ ID NO: 2560 - DNA, 24 bp, Artificial sequence
  Primer
gtcggactctaattagagtccgac

SEQ ID NO: 2561 - DNA, 24 bp, Artificial sequence
  Primer
ggtggactctaattagagtccacc

SEQ ID NO: 2562 - DNA, 24 bp, Artificial sequence
  Primer
ggctgactctaattagagtcagcc

SEQ ID NO: 2563 - DNA, 24 bp, Artificial sequence
  Primer
gcccgactctaattagagtcgggc

SEQ ID NO: 2564 - DNA, 24 bp, Artificial sequence
  Primer
acccgactctaattagagtcgggt

SEQ ID NO: 2565 - DNA, 24 bp, Artificial sequence
  Primer
gaccgactctaattagagtcggtc

SEQ ID NO: 2566 - DNA, 24 bp, Artificial sequence
  Primer
gcacgactctaattagagtcgtgc

SEQ ID NO: 2567 - DNA, 24 bp, Artificial sequence
  Primer
gccagactctaattagagtctggc

SEQ ID NO: 2568 - DNA, 24 bp, Artificial sequence
  Primer
tcccgactctaattagagtcggga

SEQ ID NO: 2569 - DNA, 24 bp, Artificial sequence
  Primer
gtccgactctaattagagtcggac

SEQ ID NO: 2570 - DNA, 24 bp, Artificial sequence
  Primer
gcctgactctaattagagtcaggc

SEQ ID NO: 2571 - DNA, 24 bp, Artificial sequence
  Primer
gggcgactctaattagagtcgccc

SEQ ID NO: 2572 - DNA, 24 bp, Artificial sequence
  Primer
aggcgactctaattagagtcgcct

SEQ ID NO: 2573 - DNA, 24 bp, Artificial sequence
  Primer
gagcgactctaattagagtcgctc

SEQ ID NO: 2574 - DNA, 24 bp, Artificial sequence
  Primer
ggacgactctaattagagtcgtcc

SEQ ID NO: 2575 - DNA, 24 bp, Artificial sequence
  Primer
gggagactctaattagagtctccc

SEQ ID NO: 2576 - DNA, 24 bp, Artificial sequence
  Primer
tggcgactctaattagagtcgcca

SEQ ID NO: 2577 - DNA, 24 bp, Artificial sequence
  Primer
gtgcgactctaattagagtcgcac

SEQ ID NO: 2578 - DNA, 24 bp, Artificial sequence
  Primer
gggtgactctaattagagtcaccc

SEQ ID NO: 2579 - DNA, 24 bp, Artificial sequence
  Primer
acgggactctaattagagtcccgt

SEQ ID NO: 2580 - DNA, 24 bp, Artificial sequence
  Primer
cagggactctaattagagtccctg

SEQ ID NO: 2581 - DNA, 24 bp, Artificial sequence
  Primer
ccaggactctaattagagtcctgg

SEQ ID NO: 2582 - DNA, 24 bp, Artificial sequence
  Primer
ccgagactctaattagagtctcgg

SEQ ID NO: 2583 - DNA, 24 bp, Artificial sequence
  Primer
tcgggactctaattagagtcccga

SEQ ID NO: 2584 - DNA, 24 bp, Artificial sequence
  Primer
ctgggactctaattagagtcccag

SEQ ID NO: 2585 - DNA, 24 bp, Artificial sequence
  Primer
cctggactctaattagagtccagg

SEQ ID NO: 2586 - DNA, 24 bp, Artificial sequence
  Primer
ccgtgactctaattagagtcacgg

SEQ ID NO: 2587 - DNA, 24 bp, Artificial sequence
  Primer
cggcgactctaattagagtcgccg

SEQ ID NO: 2588 - DNA, 24 bp, Artificial sequence
  Primer
cagcgactctaattagagtcgctg

SEQ ID NO: 2589 - DNA, 24 bp, Artificial sequence
  Primer
cgacgactctaattagagtcgtcg

SEQ ID NO: 2590 - DNA, 24 bp, Artificial sequence
  Primer
cggagactctaattagagtctccg

SEQ ID NO: 2591 - DNA, 24 bp, Artificial sequence
  Primer
ctgcgactctaattagagtcgcag

SEQ ID NO: 2592 - DNA, 24 bp, Artificial sequence
  Primer
cggtgactctaattagagtcaccg

SEQ ID NO: 2593 - DNA, 24 bp, Artificial sequence
  Primer
cacggactctaattagagtccgtg

SEQ ID NO: 2594 - DNA, 24 bp, Artificial sequence
  Primer
cccagactctaattagagtctggg

SEQ ID NO: 2595 - DNA, 24 bp, Artificial sequence
  Primer
ctcggactctaattagagtccgag

SEQ ID NO: 2596 - DNA, 24 bp, Artificial sequence
  Primer
ccctgactctaattagagtcaggg

SEQ ID NO: 2597 - DNA, 24 bp, Artificial sequence
  Primer
ccacgactctaattagagtcgtgg

SEQ ID NO: 2598 - DNA, 24 bp, Artificial sequence
  Primer
agccgactctaattagagtcggct

SEQ ID NO: 2599 - DNA, 24 bp, Artificial sequence
  Primer
tgccgactctaattagagtcggca

SEQ ID NO: 2600 - DNA, 24 bp, Artificial sequence
  Primer
gcgagactctaattagagtctcgc

SEQ ID NO: 2601 - DNA, 24 bp, Artificial sequence
  Primer
gcgtgactctaattagagtcacgc

SEQ ID NO: 2602 - DNA, 24 bp, Artificial sequence
  Primer
gcaggactctaattagagtcctgc

SEQ ID NO: 2603 - DNA, 24 bp, Artificial sequence
  Primer
gctggactctaattagagtccagc

SEQ ID NO: 2604 - DNA, 24 bp, Artificial sequence
  Primer
cgaggactctaattagagtcctcg

SEQ ID NO: 2605 - DNA, 24 bp, Artificial sequence
  Primer
cgtggactctaattagagtccacg

SEQ ID NO: 2606 - DNA, 24 bp, Artificial sequence
  Primer
caccgactctaattagagtcggtg

SEQ ID NO: 2607 - DNA, 24 bp, Artificial sequence
  Primer
ctccgactctaattagagtcggag

SEQ ID NO: 2608 - DNA, 24 bp, Artificial sequence
  Primer
gcgggactctaattagagtcccgc

SEQ ID NO: 2609 - DNA, 24 bp, Artificial sequence
  Primer
gagggactctaattagagtccctc

SEQ ID NO: 2610 - DNA, 24 bp, Artificial sequence
  Primer
gtgggactctaattagagtcccac

SEQ ID NO: 2611 - DNA, 24 bp, Artificial sequence
  Primer
  misc_feature (1)..(4): n is a, c, g, or t
  misc_feature (21)..(24): n is a, c, g, or t
nnnngactctatatagagtcnnnn

SEQ ID NO: 2612 - DNA, 24 bp, Artificial sequence
  Primer
ggcggactctatatagagtccgcc

SEQ ID NO: 2613 - DNA, 24 bp, Artificial sequence
  Primer
agcggactctatatagagtccgct

SEQ ID NO: 2614 - DNA, 24 bp, Artificial sequence
  Primer
gacggactctatatagagtccgtc

SEQ ID NO: 2615 - DNA, 24 bp, Artificial sequence
  Primer
ggaggactctatatagagtcctcc

SEQ ID NO: 2616 - DNA, 24 bp, Artificial sequence
  Primer
ggcagactctatatagagtctgcc

SEQ ID NO: 2617 - DNA, 24 bp, Artificial sequence
  Primer
tgcggactctatatagagtccgca

SEQ ID NO: 2618 - DNA, 24 bp, Artificial sequence
  Primer
gtcggactctatatagagtccgac

SEQ ID NO: 2619 - DNA, 24 bp, Artificial sequence
  Primer
ggtggactctatatagagtccacc

SEQ ID NO: 2620 - DNA, 24 bp, Artificial sequence
  Primer
ggctgactctatatagagtcagcc

SEQ ID NO: 2621 - DNA, 24 bp, Artificial sequence
  Primer
gcccgactctatatagagtcgggc

SEQ ID NO: 2622 - DNA, 24 bp, Artificial sequence
  Primer
acccgactctatatagagtcgggt

SEQ ID NO: 2623 - DNA, 24 bp, Artificial sequence
  Primer
gaccgactctatatagagtcggtc

SEQ ID NO: 2624 - DNA, 24 bp, Artificial sequence
  Primer
gcacgactctatatagagtcgtgc

SEQ ID NO: 2625 - DNA, 24 bp, Artificial sequence
  Primer
gccagactctatatagagtctggc

SEQ ID NO: 2626 - DNA, 24 bp, Artificial sequence
  Primer
tcccgactctatatagagtcggga

SEQ ID NO: 2627 - DNA, 24 bp, Artificial sequence
  Primer
gtccgactctatatagagtcggac

SEQ ID NO: 2628 - DNA, 24 bp, Artificial sequence
  Primer
gcctgactctatatagagtcaggc

SEQ ID NO: 2629 - DNA, 24 bp, Artificial sequence
  Primer
gggcgactctatatagagtcgccc

SEQ ID NO: 2630 - DNA, 24 bp, Artificial sequence
  Primer
aggcgactctatatagagtcgcct

SEQ ID NO: 2631 - DNA, 24 bp, Artificial sequence
  Primer
gagcgactctatatagagtcgctc

SEQ ID NO: 2632 - DNA, 24 bp, Artificial sequence
  Primer
ggacgactctatatagagtcgtcc

SEQ ID NO: 2633 - DNA, 24 bp, Artificial sequence
  Primer
gggagactctatatagagtctccc

SEQ ID NO: 2634 - DNA, 24 bp, Artificial sequence
  Primer
tggcgactctatatagagtcgcca

SEQ ID NO: 2635 - DNA, 24 bp, Artificial sequence
  Primer
gtgcgactctatatagagtcgcac

SEQ ID NO: 2636 - DNA, 24 bp, Artificial sequence
  Primer
gggtgactctatatagagtcaccc

SEQ ID NO: 2637 - DNA, 24 bp, Artificial sequence
  Primer
acgggactctatatagagtcccgt

SEQ ID NO: 2638 - DNA, 24 bp, Artificial sequence
  Primer
cagggactctatatagagtccctg

SEQ ID NO: 2639 - DNA, 24 bp, Artificial sequence
  Primer
ccaggactctatatagagtcctgg

SEQ ID NO: 2640 - DNA, 24 bp, Artificial sequence
  Primer
ccgagactctatatagagtctcgg

SEQ ID NO: 2641 - DNA, 24 bp, Artificial sequence
  Primer
tcgggactctatatagagtcccga

SEQ ID NO: 2642 - DNA, 24 bp, Artificial sequence
  Primer
ctgggactctatatagagtcccag

SEQ ID NO: 2643 - DNA, 24 bp, Artificial sequence
  Primer
cctggactctatatagagtccagg

SEQ ID NO: 2644 - DNA, 24 bp, Artificial sequence
  Primer
ccgtgactctatatagagtcacgg

SEQ ID NO: 2645 - DNA, 24 bp, Artificial sequence
  Primer
cggcgactctatatagagtcgccg

SEQ ID NO: 2646 - DNA, 24 bp, Artificial sequence
  Primer
cagcgactctatatagagtcgctg

SEQ ID NO: 2647 - DNA, 24 bp, Artificial sequence
  Primer
cgacgactctatatagagtcgtcg

SEQ ID NO: 2648 - DNA, 24 bp, Artificial sequence
  Primer
cggagactctatatagagtctccg

SEQ ID NO: 2649 - DNA, 24 bp, Artificial sequence
  Primer
ctgcgactctatatagagtcgcag

SEQ ID NO: 2650 - DNA, 24 bp, Artificial sequence
  Primer
cggtgactctatatagagtcaccg

SEQ ID NO: 2651 - DNA, 24 bp, Artificial sequence
  Primer
cacggactctatatagagtccgtg

SEQ ID NO: 2652 - DNA, 24 bp, Artificial sequence
  Primer
cccagactctatatagagtctggg

SEQ ID NO: 2653 - DNA, 24 bp, Artificial sequence
  Primer
ctcggactctatatagagtccgag

SEQ ID NO: 2654 - DNA, 24 bp, Artificial sequence
  Primer
ccctgactctatatagagtcaggg

SEQ ID NO: 2655 - DNA, 24 bp, Artificial sequence
  Primer
ccacgactctatatagagtcgtgg

SEQ ID NO: 2656 - DNA, 24 bp, Artificial sequence
  Primer
agccgactctatatagagtcggct

SEQ ID NO: 2657 - DNA, 24 bp, Artificial sequence
  Primer
tgccgactctatatagagtcggca

SEQ ID NO: 2658 - DNA, 24 bp, Artificial sequence
  Primer
gcgagactctatatagagtctcgc

SEQ ID NO: 2659 - DNA, 24 bp, Artificial sequence
  Primer
gcgtgactctatatagagtcacgc

SEQ ID NO: 2660 - DNA, 24 bp, Artificial sequence
  Primer
gcaggactctatatagagtcctgc

SEQ ID NO: 2661 - DNA, 24 bp, Artificial sequence
  Primer
gctggactctatatagagtccagc

SEQ ID NO: 2662 - DNA, 24 bp, Artificial sequence
  Primer
cgaggactctatatagagtcctcg

SEQ ID NO: 2663 - DNA, 24 bp, Artificial sequence
  Primer
cgtggactctatatagagtccacg

SEQ ID NO: 2664 - DNA, 24 bp, Artificial sequence
  Primer
caccgactctatatagagtcggtg

SEQ ID NO: 2665 - DNA, 24 bp, Artificial sequence
  Primer
ctccgactctatatagagtcggag

SEQ ID NO: 2666 - DNA, 24 bp, Artificial sequence
  Primer
gcgggactctatatagagtcccgc

SEQ ID NO: 2667 - DNA, 24 bp, Artificial sequence
  Primer
gagggactctatatagagtccctc

SEQ ID NO: 2668 - DNA, 24 bp, Artificial sequence
  Primer
gtgggactctatatagagtcccac

SEQ ID NO: 2669 - DNA, 24 bp, Artificial sequence
  Primer
  misc_feature (1)..(4): n is a, c, g, or t
  misc_feature (21)..(24): n is a, c, g, or t
nnnngactctagctagagtcnnnn

SEQ ID NO: 2670 - DNA, 24 bp, Artificial sequence
  Primer
ggcggactctagctagagtccgcc

SEQ ID NO: 2671 - DNA, 24 bp, Artificial sequence
  Primer
agcggactctagctagagtccgct

SEQ ID NO: 2672 - DNA, 24 bp, Artificial sequence
  Primer
gacggactctagctagagtccgtc

SEQ ID NO: 2673 - DNA, 24 bp, Artificial sequence
  Primer
ggaggactctagctagagtcctcc

SEQ ID NO: 2674 - DNA, 24 bp, Artificial sequence
  Primer
ggcagactctagctagagtctgcc

SEQ ID NO: 2675 - DNA, 24 bp, Artificial sequence
  Primer
tgcggactctagctagagtccgca

SEQ ID NO: 2676 - DNA, 24 bp, Artificial sequence
  Primer
gtcggactctagctagagtccgac

SEQ ID NO: 2677 - DNA, 24 bp, Artificial sequence
  Primer
ggtggactctagctagagtccacc

SEQ ID NO: 2678 - DNA, 24 bp, Artificial sequence
  Primer
ggctgactctagctagagtcagcc

SEQ ID NO: 2679 - DNA, 24 bp, Artificial sequence
  Primer
gcccgactctagctagagtcgggc

SEQ ID NO: 2680 - DNA, 24 bp, Artificial sequence
  Primer
acccgactctagctagagtcgggt

SEQ ID NO: 2681 - DNA, 24 bp, Artificial sequence
  Primer
gaccgactctagctagagtcggtc

SEQ ID NO: 2682 - DNA, 24 bp, Artificial sequence
  Primer
gcacgactctagctagagtcgtgc

SEQ ID NO: 2683 - DNA, 24 bp, Artificial sequence
  Primer
gccagactctagctagagtctggc

SEQ ID NO: 2684 - DNA, 24 bp, Artificial sequence
  Primer
tcccgactctagctagagtcggga

SEQ ID NO: 2685 - DNA, 24 bp, Artificial sequence
  Primer
gtccgactctagctagagtcggac

SEQ ID NO: 2686 - DNA, 24 bp, Artificial sequence
  Primer
gcctgactctagctagagtcaggc

SEQ ID NO: 2687 - DNA, 24 bp, Artificial sequence
  Primer
gggcgactctagctagagtcgccc

SEQ ID NO: 2688 - DNA, 24 bp, Artificial sequence
  Primer
aggcgactctagctagagtcgcct

SEQ ID NO: 2689 - DNA, 24 bp, Artificial sequence
  Primer
gagcgactctagctagagtcgctc

SEQ ID NO: 2690 - DNA, 24 bp, Artificial sequence
  Primer
ggacgactctagctagagtcgtcc

SEQ ID NO: 2691 - DNA, 24 bp, Artificial sequence
  Primer
gggagactctagctagagtctccc

SEQ ID NO: 2692 - DNA, 24 bp, Artificial sequence
  Primer
tggcgactctagctagagtcgcca

SEQ ID NO: 2693 - DNA, 24 bp, Artificial sequence
  Primer
gtgcgactctagctagagtcgcac

SEQ ID NO: 2694 - DNA, 24 bp, Artificial sequence
  Primer
gggtgactctagctagagtcaccc

SEQ ID NO: 2695 - DNA, 24 bp, Artificial sequence
  Primer
acgggactctagctagagtcccgt

SEQ ID NO: 2696 - DNA, 24 bp, Artificial sequence
  Primer
cagggactctagctagagtccctg

SEQ ID NO: 2697 - DNA, 24 bp, Artificial sequence
  Primer
ccaggactctagctagagtcctgg

SEQ ID NO: 2698 - DNA, 24 bp, Artificial sequence
  Primer
ccgagactctagctagagtctcgg

SEQ ID NO: 2699 - DNA, 24 bp, Artificial sequence
  Primer
tcgggactctagctagagtcccga

SEQ ID NO: 2700 - DNA, 24 bp, Artificial sequence
  Primer
ctgggactctagctagagtcccag

SEQ ID NO: 2701 - DNA, 24 bp, Artificial sequence
  Primer
cctggactctagctagagtccagg

SEQ ID NO: 2702 - DNA, 24 bp, Artificial sequence
  Primer
ccgtgactctagctagagtcacgg

SEQ ID NO: 2703 - DNA, 24 bp, Artificial sequence
  Primer
cggcgactctagctagagtcgccg

SEQ ID NO: 2704 - DNA, 24 bp, Artificial sequence
  Primer
cagcgactctagctagagtcgctg

SEQ ID NO: 2705 - DNA, 24 bp, Artificial sequence
  Primer
cgacgactctagctagagtcgtcg

SEQ ID NO: 2706 - DNA, 24 bp, Artificial sequence
  Primer
cggagactctagctagagtctccg

SEQ ID NO: 2707 - DNA, 24 bp, Artificial sequence
  Primer
ctgcgactctagctagagtcgcag

SEQ ID NO: 2708 - DNA, 24 bp, Artificial sequence
  Primer
cggtgactctagctagagtcaccg

SEQ ID NO: 2709 - DNA, 24 bp, Artificial sequence
  Primer
cacggactctagctagagtccgtg

SEQ ID NO: 2710 - DNA, 24 bp, Artificial sequence
  Primer
cccagactctagctagagtctggg

SEQ ID NO: 2711 - DNA, 24 bp, Artificial sequence
  Primer
ctcggactctagctagagtccgag

SEQ ID NO: 2712 - DNA, 24 bp, Artificial sequence
  Primer
ccctgactctagctagagtcaggg

SEQ ID NO: 2713 - DNA, 24 bp, Artificial sequence
  Primer
ccacgactctagctagagtcgtgg

SEQ ID NO: 2714 - DNA, 24 bp, Artificial sequence
  Primer
agccgactctagctagagtcggct

SEQ ID NO: 2715 - DNA, 24 bp, Artificial sequence
  Primer
tgccgactctagctagagtcggca

SEQ ID NO: 2716 - DNA, 24 bp, Artificial sequence
  Primer
gcgagactctagctagagtctcgc

SEQ ID NO: 2717 - DNA, 24 bp, Artificial sequence
  Primer
gcgtgactctagctagagtcacgc

SEQ ID NO: 2718 - DNA, 24 bp, Artificial sequence
  Primer
gcaggactctagctagagtcctgc

SEQ ID NO: 2719 - DNA, 24 bp, Artificial sequence
  Primer
gctggactctagctagagtccagc

SEQ ID NO: 2720 - DNA, 24 bp, Artificial sequence
  Primer
cgaggactctagctagagtcctcg

SEQ ID NO: 2721 - DNA, 24 bp, Artificial sequence
  Primer
cgtggactctagctagagtccacg

SEQ ID NO: 2722 - DNA, 24 bp, Artificial sequence
  Primer
caccgactctagctagagtcggtg

SEQ ID NO: 2723 - DNA, 24 bp, Artificial sequence
  Primer
ctccgactctagctagagtcggag

SEQ ID NO: 2724 - DNA, 24 bp, Artificial sequence
  Primer
gcgggactctagctagagtcccgc

SEQ ID NO: 2725 - DNA, 24 bp, Artificial sequence
  Primer
gagggactctagctagagtccctc

SEQ ID NO: 2726 - DNA, 24 bp, Artificial sequence
  Primer
gtgggactctagctagagtcccac

SEQ ID NO: 2727 - DNA, 24 bp, Artificial sequence
  Primer
  misc_feature (1)..(4): n is a, c, g, or t
  misc_feature (21)..(24): n is a, c, g, or t
nnnngactctacgtagagtcnnnn

SEQ ID NO: 2728 - DNA, 24 bp, Artificial sequence
  Primer
ggcggactctacgtagagtccgcc

SEQ ID NO: 2729 - DNA, 24 bp, Artificial sequence
  Primer
agcggactctacgtagagtccgct

SEQ ID NO: 2730 - DNA, 24 bp, Artificial sequence
  Primer
gacggactctacgtagagtccgtc

SEQ ID NO: 2731 - DNA, 24 bp, Artificial sequence
  Primer
ggaggactctacgtagagtcctcc

SEQ ID NO: 2732 - DNA, 24 bp, Artificial sequence
  Primer
ggcagactctacgtagagtctgcc

SEQ ID NO: 2733 - DNA, 24 bp, Artificial sequence
  Primer
tgcggactctacgtagagtccgca

SEQ ID NO: 2734 - DNA, 24 bp, Artificial sequence
  Primer
gtcggactctacgtagagtccgac

SEQ ID NO: 2735 - DNA, 24 bp, Artificial sequence
  Primer
ggtggactctacgtagagtccacc

SEQ ID NO: 2736 - DNA, 24 bp, Artificial sequence
  Primer
ggctgactctacgtagagtcagcc

SEQ ID NO: 2737 - DNA, 24 bp, Artificial sequence
  Primer
gcccgactctacgtagagtcgggc

SEQ ID NO: 2738 - DNA, 24 bp, Artificial sequence
  Primer
acccgactctacgtagagtcgggt

SEQ ID NO: 2739 - DNA, 24 bp, Artificial sequence
  Primer
gaccgactctacgtagagtcggtc

SEQ ID NO: 2740 - DNA, 24 bp, Artificial sequence
  Primer
gcacgactctacgtagagtcgtgc

SEQ ID NO: 2741 - DNA, 24 bp, Artificial sequence
  Primer
gccagactctacgtagagtctggc

SEQ ID NO: 2742 - DNA, 24 bp, Artificial sequence
  Primer
tcccgactctacgtagagtcggga

SEQ ID NO: 2743 - DNA, 24 bp, Artificial sequence
  Primer
gtccgactctacgtagagtcggac

SEQ ID NO: 2744 - DNA, 24 bp, Artificial sequence
  Primer
gcctgactctacgtagagtcaggc

SEQ ID NO: 2745 - DNA, 24 bp, Artificial sequence
  Primer
gggcgactctacgtagagtcgccc

SEQ ID NO: 2746 - DNA, 24 bp, Artificial sequence
  Primer
aggcgactctacgtagagtcgcct

SEQ ID NO: 2747 - DNA, 24 bp, Artificial sequence
  Primer
gagcgactctacgtagagtcgctc

SEQ ID NO: 2748 - DNA, 24 bp, Artificial sequence
  Primer
ggacgactctacgtagagtcgtcc

SEQ ID NO: 2749 - DNA, 24 bp, Artificial sequence
  Primer
gggagactctacgtagagtctccc

SEQ ID NO: 2750 - DNA, 24 bp, Artificial sequence
  Primer
tggcgactctacgtagagtcgcca

SEQ ID NO: 2751 - DNA, 24 bp, Artificial sequence
  Primer
gtgcgactctacgtagagtcgcac

SEQ ID NO: 2752 - DNA, 24 bp, Artificial sequence
  Primer
gggtgactctacgtagagtcaccc

SEQ ID NO: 2753 - DNA, 24 bp, Artificial sequence
  Primer
acgggactctacgtagagtcccgt

SEQ ID NO: 2754 - DNA, 24 bp, Artificial sequence
  Primer
cagggactctacgtagagtccctg

SEQ ID NO: 2755 - DNA, 24 bp, Artificial sequence
  Primer
ccaggactctacgtagagtcctgg

SEQ ID NO: 2756 - DNA, 24 bp, Artificial sequence
  Primer
ccgagactctacgtagagtctcgg

SEQ ID NO: 2757 - DNA, 24 bp, Artificial sequence
  Primer
tcgggactctacgtagagtcccga

SEQ ID NO: 2758 - DNA, 24 bp, Artificial sequence
  Primer
ctgggactctacgtagagtcccag

SEQ ID NO: 2759 - DNA, 24 bp, Artificial sequence
  Primer
cctggactctacgtagagtccagg

SEQ ID NO: 2760 - DNA, 24 bp, Artificial sequence
  Primer
ccgtgactctacgtagagtcacgg

SEQ ID NO: 2761 - DNA, 24 bp, Artificial sequence
  Primer
cggcgactctacgtagagtcgccg

SEQ ID NO: 2762 - DNA, 24 bp, Artificial sequence
  Primer
cagcgactctacgtagagtcgctg

SEQ ID NO: 2763 - DNA, 24 bp, Artificial sequence
  Primer
cgacgactctacgtagagtcgtcg

SEQ ID NO: 2764 - DNA, 24 bp, Artificial sequence
  Primer
cggagactctacgtagagtctccg

SEQ ID NO: 2765 - DNA, 24 bp, Artificial sequence
  Primer
ctgcgactctacgtagagtcgcag

SEQ ID NO: 2766 - DNA, 24 bp, Artificial sequence
  Primer
cggtgactctacgtagagtcaccg

SEQ ID NO: 2767 - DNA, 24 bp, Artificial sequence
  Primer
cacggactctacgtagagtccgtg

SEQ ID NO: 2768 - DNA, 24 bp, Artificial sequence
  Primer
cccagactctacgtagagtctggg

SEQ ID NO: 2769 - DNA, 24 bp, Artificial sequence
  Primer
ctcggactctacgtagagtccgag

SEQ ID NO: 2770 - DNA, 24 bp, Artificial sequence
  Primer
ccctgactctacgtagagtcaggg

SEQ ID NO: 2771 - DNA, 24 bp, Artificial sequence
  Primer
ccacgactctacgtagagtcgtgg

SEQ ID NO: 2772 - DNA, 24 bp, Artificial sequence
  Primer
agccgactctacgtagagtcggct

SEQ ID NO: 2773 - DNA, 24 bp, Artificial sequence
  Primer
tgccgactctacgtagagtcggca

SEQ ID NO: 2774 - DNA, 24 bp, Artificial sequence
  Primer
gcgagactctacgtagagtctcgc

SEQ ID NO: 2775 - DNA, 24 bp, Artificial sequence
  Primer
gcgtgactctacgtagagtcacgc

SEQ ID NO: 2776 - DNA, 24 bp, Artificial sequence
  Primer
gcaggactctacgtagagtcctgc

SEQ ID NO: 2777 - DNA, 24 bp, Artificial sequence
  Primer
gctggactctacgtagagtccagc

SEQ ID NO: 2778 - DNA, 24 bp, Artificial sequence
  Primer
cgaggactctacgtagagtcctcg

SEQ ID NO: 2779 - DNA, 24 bp, Artificial sequence
  Primer
cgtggactctacgtagagtccacg

SEQ ID NO: 2780 - DNA, 24 bp, Artificial sequence
  Primer
caccgactctacgtagagtcggtg

SEQ ID NO: 2781 - DNA, 24 bp, Artificial sequence
  Primer
ctccgactctacgtagagtcggag

SEQ ID NO: 2782 - DNA, 24 bp, Artificial sequence
  Primer
gcgggactctacgtagagtcccgc

SEQ ID NO: 2783 - DNA, 24 bp, Artificial sequence
  Primer
gagggactctacgtagagtccctc

SEQ ID NO: 2784 - DNA, 24 bp, Artificial sequence
  Primer
gtgggactctacgtagagtcccac

SEQ ID NO: 2785 - DNA, 24 bp, Artificial sequence
  Primer
  misc_feature (1)..(4): n is a, c, g, or t
  misc_feature (21)..(24): n is a, c, g, or t
nnnngactcatatatgagtcnnnn

SEQ ID NO: 2786 - DNA, 24 bp, Artificial sequence
  Primer
ggcggactcatatatgagtccgcc

SEQ ID NO: 2787 - DNA, 24 bp, Artificial sequence
  Primer
agcggactcatatatgagtccgct

SEQ ID NO: 2788 - DNA, 24 bp, Artificial sequence
  Primer
gacggactcatatatgagtccgtc

SEQ ID NO: 2789 - DNA, 24 bp, Artificial sequence
  Primer
ggaggactcatatatgagtcctcc

SEQ ID NO: 2790 - DNA, 24 bp, Artificial sequence
  Primer
ggcagactcatatatgagtctgcc

SEQ ID NO: 2791 - DNA, 24 bp, Artificial sequence
  Primer
tgcggactcatatatgagtccgca

SEQ ID NO: 2792 - DNA, 24 bp, Artificial sequence
  Primer
gtcggactcatatatgagtccgac

SEQ ID NO: 2793 - DNA, 24 bp, Artificial sequence
  Primer
ggtggactcatatatgagtccacc

SEQ ID NO: 2794 - DNA, 24 bp, Artificial sequence
  Primer
ggctgactcatatatgagtcagcc

SEQ ID NO: 2795 - DNA, 24 bp, Artificial sequence
  Primer
gcccgactcatatatgagtcgggc

SEQ ID NO: 2796 - DNA, 24 bp, Artificial sequence
  Primer
acccgactcatatatgagtcgggt

SEQ ID NO: 2797 - DNA, 24 bp, Artificial sequence
  Primer
gaccgactcatatatgagtcggtc

SEQ ID NO: 2798 - DNA, 24 bp, Artificial sequence
  Primer
gcacgactcatatatgagtcgtgc

SEQ ID NO: 2799 - DNA, 24 bp, Artificial sequence
  Primer
gccagactcatatatgagtctggc

SEQ ID NO: 2800 - DNA, 24 bp, Artificial sequence
  Primer
tcccgactcatatatgagtcggga

SEQ ID NO: 2801 - DNA, 24 bp, Artificial sequence
  Primer
gtccgactcatatatgagtcggac

SEQ ID NO: 2802 - DNA, 24 bp, Artificial sequence
  Primer
gcctgactcatatatgagtcaggc

SEQ ID NO: 2803 - DNA, 24 bp, Artificial sequence
  Primer
gggcgactcatatatgagtcgccc

SEQ ID NO: 2804 - DNA, 24 bp, Artificial sequence
  Primer
aggcgactcatatatgagtcgcct

SEQ ID NO: 2805 - DNA, 24 bp, Artificial sequence
  Primer
gagcgactcatatatgagtcgctc

SEQ ID NO: 2806 - DNA, 24 bp, Artificial sequence
  Primer
ggacgactcatatatgagtcgtcc

SEQ ID NO: 2807 - DNA, 24 bp, Artificial sequence
  Primer
gggagactcatatatgagtctccc

SEQ ID NO: 2808 - DNA, 24 bp, Artificial sequence
  Primer
tggcgactcatatatgagtcgcca

SEQ ID NO: 2809 - DNA, 24 bp, Artificial sequence
  Primer
gtgcgactcatatatgagtcgcac

SEQ ID NO: 2810 - DNA, 24 bp, Artificial sequence
  Primer
gggtgactcatatatgagtcaccc

SEQ ID NO: 2811 - DNA, 24 bp, Artificial sequence
  Primer
acgggactcatatatgagtcccgt

SEQ ID NO: 2812 - DNA, 24 bp, Artificial sequence
  Primer
cagggactcatatatgagtccctg

SEQ ID NO: 2813 - DNA, 24 bp, Artificial sequence
  Primer
ccaggactcatatatgagtcctgg

SEQ ID NO: 2814 - DNA, 24 bp, Artificial sequence
  Primer
ccgagactcatatatgagtctcgg

SEQ ID NO: 2815 - DNA, 24 bp, Artificial sequence
  Primer
tcgggactcatatatgagtcccga

SEQ ID NO: 2816 - DNA, 24 bp, Artificial sequence
  Primer
ctgggactcatatatgagtcccag

SEQ ID NO: 2817 - DNA, 24 bp, Artificial sequence
  Primer
cctggactcatatatgagtccagg

SEQ ID NO: 2818 - DNA, 24 bp, Artificial sequence
  Primer
ccgtgactcatatatgagtcacgg

SEQ ID NO: 2819 - DNA, 24 bp, Artificial sequence
  Primer
cggcgactcatatatgagtcgccg

SEQ ID NO: 2820 - DNA, 24 bp, Artificial sequence
  Primer
cagcgactcatatatgagtcgctg

SEQ ID NO: 2821 - DNA, 24 bp, Artificial sequence
  Primer
cgacgactcatatatgagtcgtcg

SEQ ID NO: 2822 - DNA, 24 bp, Artificial sequence
  Primer
cggagactcatatatgagtctccg

SEQ ID NO: 2823 - DNA, 24 bp, Artificial sequence
  Primer
ctgcgactcatatatgagtcgcag

SEQ ID NO: 2824 - DNA, 24 bp, Artificial sequence
  Primer
cggtgactcatatatgagtcaccg

SEQ ID NO: 2825 - DNA, 24 bp, Artificial sequence
  Primer
cacggactcatatatgagtccgtg

SEQ ID NO: 2826 - DNA, 24 bp, Artificial sequence
  Primer
cccagactcatatatgagtctggg

SEQ ID NO: 2827 - DNA, 24 bp, Artificial sequence
  Primer
ctcggactcatatatgagtccgag

SEQ ID NO: 2828 - DNA, 24 bp, Artificial sequence
  Primer
ccctgactcatatatgagtcaggg

SEQ ID NO: 2829 - DNA, 24 bp, Artificial sequence
  Primer
ccacgactcatatatgagtcgtgg

SEQ ID NO: 2830 - DNA, 24 bp, Artificial sequence
  Primer
agccgactcatatatgagtcggct

SEQ ID NO: 2831 - DNA, 24 bp, Artificial sequence
  Primer
tgccgactcatatatgagtcggca

SEQ ID NO: 2832 - DNA, 24 bp, Artificial sequence
  Primer
gcgagactcatatatgagtctcgc

SEQ ID NO: 2833 - DNA, 24 bp, Artificial sequence
  Primer
gcgtgactcatatatgagtcacgc

SEQ ID NO: 2834 - DNA, 24 bp, Artificial sequence
  Primer
gcaggactcatatatgagtcctgc

SEQ ID NO: 2835 - DNA, 24 bp, Artificial sequence
  Primer
gctggactcatatatgagtccagc

SEQ ID NO: 2836 - DNA, 24 bp, Artificial sequence
  Primer
cgaggactcatatatgagtcctcg

SEQ ID NO: 2837 - DNA, 24 bp, Artificial sequence
  Primer
cgtggactcatatatgagtccacg

SEQ ID NO: 2838 - DNA, 24 bp, Artificial sequence
  Primer
caccgactcatatatgagtcggtg

SEQ ID NO: 2839 - DNA, 24 bp, Artificial sequence
  Primer
ctccgactcatatatgagtcggag

SEQ ID NO: 2840 - DNA, 24 bp, Artificial sequence
  Primer
gcgggactcatatatgagtcccgc

SEQ ID NO: 2841 - DNA, 24 bp, Artificial sequence
  Primer
gagggactcatatatgagtccctc

SEQ ID NO: 2842 - DNA, 24 bp, Artificial sequence
  Primer
gtgggactcatatatgagtcccac

SEQ ID NO: 2843 - DNA, 24 bp, Artificial sequence
  Primer
  misc_feature (1)..(4): n is a, c, g, or t
  misc_feature (21)..(24): n is a, c, g, or t
nnnngactcattaatgagtcnnnn

SEQ ID NO: 2844 - DNA, 24 bp, Artificial sequence
  Primer
ggcggactcattaatgagtccgcc

SEQ ID NO: 2845 - DNA, 24 bp, Artificial sequence
  Primer
agcggactcattaatgagtccgct

SEQ ID NO: 2846 - DNA, 24 bp, Artificial sequence
  Primer
gacggactcattaatgagtccgtc

SEQ ID NO: 2847 - DNA, 24 bp, Artificial sequence
  Primer
ggaggactcattaatgagtcctcc

SEQ ID NO: 2848 - DNA, 24 bp, Artificial sequence
  Primer
ggcagactcattaatgagtctgcc

SEQ ID NO: 2849 - DNA, 24 bp, Artificial sequence
  Primer
tgcggactcattaatgagtccgca

SEQ ID NO: 2850 - DNA, 24 bp, Artificial sequence
  Primer
gtcggactcattaatgagtccgac

SEQ ID NO: 2851 - DNA, 24 bp, Artificial sequence
  Primer
ggtggactcattaatgagtccacc

SEQ ID NO: 2852 - DNA, 24 bp, Artificial sequence
  Primer
ggctgactcattaatgagtcagcc

SEQ ID NO: 2853 - DNA, 24 bp, Artificial sequence
  Primer
gcccgactcattaatgagtcgggc

SEQ ID NO: 2854 - DNA, 24 bp, Artificial sequence
  Primer
acccgactcattaatgagtcgggt

SEQ ID NO: 2855 - DNA, 24 bp, Artificial sequence
  Primer
gaccgactcattaatgagtcggtc

SEQ ID NO: 2856 - DNA, 24 bp, Artificial sequence
  Primer
gcacgactcattaatgagtcgtgc

SEQ ID NO: 2857 - DNA, 24 bp, Artificial sequence
  Primer
gccagactcattaatgagtctggc

SEQ ID NO: 2858 - DNA, 24 bp, Artificial sequence
  Primer
tcccgactcattaatgagtcggga

SEQ ID NO: 2859 - DNA, 24 bp, Artificial sequence
  Primer
gtccgactcattaatgagtcggac

SEQ ID NO: 2860 - DNA, 24 bp, Artificial sequence
  Primer
gcctgactcattaatgagtcaggc

SEQ ID NO: 2861 - DNA, 24 bp, Artificial sequence
  Primer
gggcgactcattaatgagtcgccc

SEQ ID NO: 2862 - DNA, 24 bp, Artificial sequence
  Primer
aggcgactcattaatgagtcgcct

SEQ ID NO: 2863 - DNA, 24 bp, Artificial sequence
  Primer
gagcgactcattaatgagtcgctc

SEQ ID NO: 2864 - DNA, 24 bp, Artificial sequence
  Primer
ggacgactcattaatgagtcgtcc

SEQ ID NO: 2865 - DNA, 24 bp, Artificial sequence
  Primer
gggagactcattaatgagtctccc

SEQ ID NO: 2866 - DNA, 24 bp, Artificial sequence
  Primer
tggcgactcattaatgagtcgcca

SEQ ID NO: 2867 - DNA, 24 bp, Artificial sequence
  Primer
gtgcgactcattaatgagtcgcac

SEQ ID NO: 2868 - DNA, 24 bp, Artificial sequence
  Primer
gggtgactcattaatgagtcaccc

SEQ ID NO: 2869 - DNA, 24 bp, Artificial sequence
  Primer
acgggactcattaatgagtcccgt

SEQ ID NO: 2870 - DNA, 24 bp, Artificial sequence
  Primer
cagggactcattaatgagtccctg

SEQ ID NO: 2871 - DNA, 24 bp, Artificial sequence
  Primer
ccaggactcattaatgagtcctgg

SEQ ID NO: 2872 - DNA, 24 bp, Artificial sequence
  Primer
ccgagactcattaatgagtctcgg

SEQ ID NO: 2873 - DNA, 24 bp, Artificial sequence
  Primer
tcgggactcattaatgagtcccga

SEQ ID NO: 2874 - DNA, 24 bp, Artificial sequence
  Primer
ctgggactcattaatgagtcccag

SEQ ID NO: 2875 - DNA, 24 bp, Artificial sequence
  Primer
cctggactcattaatgagtccagg

SEQ ID NO: 2876 - DNA, 24 bp, Artificial sequence
  Primer
ccgtgactcattaatgagtcacgg

SEQ ID NO: 2877 - DNA, 24 bp, Artificial sequence
  Primer
cggcgactcattaatgagtcgccg

SEQ ID NO: 2878 - DNA, 24 bp, Artificial sequence
  Primer
cagcgactcattaatgagtcgctg

SEQ ID NO: 2879 - DNA, 24 bp, Artificial sequence
  Primer
cgacgactcattaatgagtcgtcg

SEQ ID NO: 2880 - DNA, 24 bp, Artificial sequence
  Primer
cggagactcattaatgagtctccg

SEQ ID NO: 2881 - DNA, 24 bp, Artificial sequence
  Primer
ctgcgactcattaatgagtcgcag

SEQ ID NO: 2882 - DNA, 24 bp, Artificial sequence
  Primer
cggtgactcattaatgagtcaccg

SEQ ID NO: 2883 - DNA, 24 bp, Artificial sequence
  Primer
cacggactcattaatgagtccgtg

SEQ ID NO: 2884 - DNA, 24 bp, Artificial sequence
  Primer
cccagactcattaatgagtctggg

SEQ ID NO: 2885 - DNA, 24 bp, Artificial sequence
  Primer
ctcggactcattaatgagtccgag

SEQ ID NO: 2886 - DNA, 24 bp, Artificial sequence
  Primer
ccctgactcattaatgagtcaggg

SEQ ID NO: 2887 - DNA, 24 bp, Artificial sequence
  Primer
ccacgactcattaatgagtcgtgg

SEQ ID NO: 2888 - DNA, 24 bp, Artificial sequence
  Primer
agccgactcattaatgagtcggct

SEQ ID NO: 2889 - DNA, 24 bp, Artificial sequence
  Primer
tgccgactcattaatgagtcggca

SEQ ID NO: 2890 - DNA, 24 bp, Artificial sequence
  Primer
gcgagactcattaatgagtctcgc

SEQ ID NO: 2891 - DNA, 24 bp, Artificial sequence
  Primer
gcgtgactcattaatgagtcacgc

SEQ ID NO: 2892 - DNA, 24 bp, Artificial sequence
  Primer
gcaggactcattaatgagtcctgc

SEQ ID NO: 2893 - DNA, 24 bp, Artificial sequence
  Primer
gctggactcattaatgagtccagc

SEQ ID NO: 2894 - DNA, 24 bp, Artificial sequence
  Primer
cgaggactcattaatgagtcctcg

SEQ ID NO: 2895 - DNA, 24 bp, Artificial sequence
  Primer
cgtggactcattaatgagtccacg

SEQ ID NO: 2896 - DNA, 24 bp, Artificial sequence
  Primer
caccgactcattaatgagtcggtg

SEQ ID NO: 2897 - DNA, 24 bp, Artificial sequence
  Primer
ctccgactcattaatgagtcggag

SEQ ID NO: 2898 - DNA, 24 bp, Artificial sequence
  Primer
gcgggactcattaatgagtcccgc

SEQ ID NO: 2899 - DNA, 24 bp, Artificial sequence
  Primer
gagggactcattaatgagtccctc

SEQ ID NO: 2900 - DNA, 24 bp, Artificial sequence
  Primer
gtgggactcattaatgagtcccac

SEQ ID NO: 2901 - DNA, 24 bp, Artificial sequence
  Primer
  misc_feature (1)..(4): n is a, c, g, or t
  misc_feature (21)..(24): n is a, c, g, or t
nnnngactcatgcatgagtcnnnn

SEQ ID NO: 2902 - DNA, 24 bp, Artificial sequence
  Primer
ggcggactcatgcatgagtccgcc

SEQ ID NO: 2903 - DNA, 24 bp, Artificial sequence
  Primer
agcggactcatgcatgagtccgct

SEQ ID NO: 2904 - DNA, 24 bp, Artificial sequence
  Primer
gacggactcatgcatgagtccgtc

SEQ ID NO: 2905 - DNA, 24 bp, Artificial sequence
  Primer
ggaggactcatgcatgagtcctcc

SEQ ID NO: 2906 - DNA, 24 bp, Artificial sequence
  Primer
ggcagactcatgcatgagtctgcc

SEQ ID NO: 2907 - DNA, 24 bp, Artificial sequence
  Primer
tgcggactcatgcatgagtccgca

SEQ ID NO: 2908 - DNA, 24 bp, Artificial sequence
  Primer
gtcggactcatgcatgagtccgac

SEQ ID NO: 2909 - DNA, 24 bp, Artificial sequence
  Primer
ggtggactcatgcatgagtccacc

SEQ ID NO: 2910 - DNA, 24 bp, Artificial sequence
  Primer
ggctgactcatgcatgagtcagcc

SEQ ID NO: 2911 - DNA, 24 bp, Artificial sequence
  Primer
gcccgactcatgcatgagtcgggc

SEQ ID NO: 2912 - DNA, 24 bp, Artificial sequence
  Primer
acccgactcatgcatgagtcgggt

SEQ ID NO: 2913 - DNA, 24 bp, Artificial sequence
  Primer
gaccgactcatgcatgagtcggtc

SEQ ID NO: 2914 - DNA, 24 bp, Artificial sequence
  Primer
gcacgactcatgcatgagtcgtgc

SEQ ID NO: 2915 - DNA, 24 bp, Artificial sequence
  Primer
gccagactcatgcatgagtctggc

SEQ ID NO: 2916 - DNA, 24 bp, Artificial sequence
  Primer
tcccgactcatgcatgagtcggga

SEQ ID NO: 2917 - DNA, 24 bp, Artificial sequence
  Primer
gtccgactcatgcatgagtcggac

SEQ ID NO: 2918 - DNA, 24 bp, Artificial sequence
  Primer
gcctgactcatgcatgagtcaggc

SEQ ID NO: 2919 - DNA, 24 bp, Artificial sequence
  Primer
gggcgactcatgcatgagtcgccc

SEQ ID NO: 2920 - DNA, 24 bp, Artificial sequence
  Primer
aggcgactcatgcatgagtcgcct

SEQ ID NO: 2921 - DNA, 24 bp, Artificial sequence
  Primer
gagcgactcatgcatgagtcgctc

SEQ ID NO: 2922 - DNA, 24 bp, Artificial sequence
  Primer
ggacgactcatgcatgagtcgtcc

SEQ ID NO: 2923 - DNA, 24 bp, Artificial sequence
  Primer
gggagactcatgcatgagtctccc

SEQ ID NO: 2924 - DNA, 24 bp, Artificial sequence
  Primer
tggcgactcatgcatgagtcgcca

SEQ ID NO: 2925 - DNA, 24 bp, Artificial sequence
  Primer
gtgcgactcatgcatgagtcgcac

SEQ ID NO: 2926 - DNA, 24 bp, Artificial sequence
  Primer
gggtgactcatgcatgagtcaccc

SEQ ID NO: 2927 - DNA, 24 bp, Artificial sequence
  Primer
acgggactcatgcatgagtcccgt

SEQ ID NO: 2928 - DNA, 24 bp, Artificial sequence
  Primer
cagggactcatgcatgagtccctg

SEQ ID NO: 2929 - DNA, 24 bp, Artificial sequence
  Primer
ccaggactcatgcatgagtcctgg

SEQ ID NO: 2930 - DNA, 24 bp, Artificial sequence
  Primer
ccgagactcatgcatgagtctcgg

SEQ ID NO: 2931 - DNA, 24 bp, Artificial sequence
  Primer
tcgggactcatgcatgagtcccga

SEQ ID NO: 2932 - DNA, 24 bp, Artificial sequence
  Primer
ctgggactcatgcatgagtcccag

SEQ ID NO: 2933 - DNA, 24 bp, Artificial sequence
  Primer
cctggactcatgcatgagtccagg

SEQ ID NO: 2934 - DNA, 24 bp, Artificial sequence
  Primer
ccgtgactcatgcatgagtcacgg

SEQ ID NO: 2935 - DNA, 24 bp, Artificial sequence
  Primer
cggcgactcatgcatgagtcgccg

SEQ ID NO: 2936 - DNA, 24 bp, Artificial sequence
  Primer
cagcgactcatgcatgagtcgctg

SEQ ID NO: 2937 - DNA, 24 bp, Artificial sequence
  Primer
cgacgactcatgcatgagtcgtcg

SEQ ID NO: 2938 - DNA, 24 bp, Artificial sequence
  Primer
cggagactcatgcatgagtctccg

SEQ ID NO: 2939 - DNA, 24 bp, Artificial sequence
  Primer
ctgcgactcatgcatgagtcgcag

SEQ ID NO: 2940 - DNA, 24 bp, Artificial sequence
  Primer
cggtgactcatgcatgagtcaccg

SEQ ID NO: 2941 - DNA, 24 bp, Artificial sequence
  Primer
cacggactcatgcatgagtccgtg

SEQ ID NO: 2942 - DNA, 24 bp, Artificial sequence
  Primer
cccagactcatgcatgagtctggg

SEQ ID NO: 2943 - DNA, 24 bp, Artificial sequence
  Primer
ctcggactcatgcatgagtccgag

SEQ ID NO: 2944 - DNA, 24 bp, Artificial sequence
  Primer
ccctgactcatgcatgagtcaggg

SEQ ID NO: 2945 - DNA, 24 bp, Artificial sequence
  Primer
ccacgactcatgcatgagtcgtgg

SEQ ID NO: 2946 - DNA, 24 bp, Artificial sequence
  Primer
agccgactcatgcatgagtcggct

SEQ ID NO: 2947 - DNA, 24 bp, Artificial sequence
  Primer
tgccgactcatgcatgagtcggca

SEQ ID NO: 2948 - DNA, 24 bp, Artificial sequence
  Primer
gcgagactcatgcatgagtctcgc

SEQ ID NO: 2949 - DNA, 24 bp, Artificial sequence
  Primer
gcgtgactcatgcatgagtcacgc

SEQ ID NO: 2950 - DNA, 24 bp, Artificial sequence
  Primer
gcaggactcatgcatgagtcctgc

SEQ ID NO: 2951 - DNA, 24 bp, Artificial sequence
  Primer
gctggactcatgcatgagtccagc

SEQ ID NO: 2952 - DNA, 24 bp, Artificial sequence
  Primer
cgaggactcatgcatgagtcctcg

SEQ ID NO: 2953 - DNA, 24 bp, Artificial sequence
  Primer
cgtggactcatgcatgagtccacg

SEQ ID NO: 2954 - DNA, 24 bp, Artificial sequence
  Primer
caccgactcatgcatgagtcggtg

SEQ ID NO: 2955 - DNA, 24 bp, Artificial sequence
  Primer
ctccgactcatgcatgagtcggag

SEQ ID NO: 2956 - DNA, 24 bp, Artificial sequence
  Primer
gcgggactcatgcatgagtcccgc

SEQ ID NO: 2957 - DNA, 24 bp, Artificial sequence
  Primer
gagggactcatgcatgagtccctc

SEQ ID NO: 2958 - DNA, 24 bp, Artificial sequence
  Primer
gtgggactcatgcatgagtcccac

SEQ ID NO: 2959 - DNA, 24 bp, Artificial sequence
  Primer
  misc_feature (1)..(4): n is a, c, g, or t
  misc_feature (21)..(24): n is a, c, g, or t
nnnngactcatcgatgagtcnnnn

SEQ ID NO: 2960 - DNA, 24 bp, Artificial sequence
  Primer
ggcggactcatcgatgagtccgcc

SEQ ID NO: 2961 - DNA, 24 bp, Artificial sequence
  Primer
agcggactcatcgatgagtccgct

SEQ ID NO: 2962 - DNA, 24 bp, Artificial sequence
  Primer
gacggactcatcgatgagtccgtc

SEQ ID NO: 2963 - DNA, 24 bp, Artificial sequence
  Primer
ggaggactcatcgatgagtcctcc

SEQ ID NO: 2964 - DNA, 24 bp, Artificial sequence
  Primer
ggcagactcatcgatgagtctgcc

SEQ ID NO: 2965 - DNA, 24 bp, Artificial sequence
  Primer
tgcggactcatcgatgagtccgca

SEQ ID NO: 2966 - DNA, 24 bp, Artificial sequence
  Primer
gtcggactcatcgatgagtccgac

SEQ ID NO: 2967 - DNA, 24 bp, Artificial sequence
  Primer
ggtggactcatcgatgagtccacc

SEQ ID NO: 2968 - DNA, 24 bp, Artificial sequence
  Primer
ggctgactcatcgatgagtcagcc

SEQ ID NO: 2969 - DNA, 24 bp, Artificial sequence
  Primer
gcccgactcatcgatgagtcgggc

SEQ ID NO: 2970 - DNA, 24 bp, Artificial sequence
  Primer
acccgactcatcgatgagtcgggt

SEQ ID NO: 2971 - DNA, 24 bp, Artificial sequence
  Primer
gaccgactcatcgatgagtcggtc

SEQ ID NO: 2972 - DNA, 24 bp, Artificial sequence
  Primer
gcacgactcatcgatgagtcgtgc

SEQ ID NO: 2973 - DNA, 24 bp, Artificial sequence
  Primer
gccagactcatcgatgagtctggc

SEQ ID NO: 2974 - DNA, 24 bp, Artificial sequence
  Primer
tcccgactcatcgatgagtcggga

SEQ ID NO: 2975 - DNA, 24 bp, Artificial sequence
  Primer
gtccgactcatcgatgagtcggac

SEQ ID NO: 2976 - DNA, 24 bp, Artificial sequence
  Primer
gcctgactcatcgatgagtcaggc

SEQ ID NO: 2977 - DNA, 24 bp, Artificial sequence
  Primer
gggcgactcatcgatgagtcgccc

SEQ ID NO: 2978 - DNA, 24 bp, Artificial sequence
  Primer
aggcgactcatcgatgagtcgcct

SEQ ID NO: 2979 - DNA, 24 bp, Artificial sequence
  Primer
gagcgactcatcgatgagtcgctc

SEQ ID NO: 2980 - DNA, 24 bp, Artificial sequence
  Primer
ggacgactcatcgatgagtcgtcc

SEQ ID NO: 2981 - DNA, 24 bp, Artificial sequence
  Primer
gggagactcatcgatgagtctccc

SEQ ID NO: 2982 - DNA, 24 bp, Artificial sequence
  Primer
tggcgactcatcgatgagtcgcca

SEQ ID NO: 2983 - DNA, 24 bp, Artificial sequence
  Primer
gtgcgactcatcgatgagtcgcac

SEQ ID NO: 2984 - DNA, 24 bp, Artificial sequence
  Primer
gggtgactcatcgatgagtcaccc

SEQ ID NO: 2985 - DNA, 24 bp, Artificial sequence
  Primer
acgggactcatcgatgagtcccgt

SEQ ID NO: 2986 - DNA, 24 bp, Artificial sequence
  Primer
cagggactcatcgatgagtccctg

SEQ ID NO: 2987 - DNA, 24 bp, Artificial sequence
  Primer
ccaggactcatcgatgagtcctgg

SEQ ID NO: 2988 - DNA, 24 bp, Artificial sequence
  Primer
ccgagactcatcgatgagtctcgg

SEQ ID NO: 2989 - DNA, 24 bp, Artificial sequence
  Primer
tcgggactcatcgatgagtcccga

SEQ ID NO: 2990 - DNA, 24 bp, Artificial sequence
  Primer
ctgggactcatcgatgagtcccag

SEQ ID NO: 2991 - DNA, 24 bp, Artificial sequence
  Primer
cctggactcatcgatgagtccagg

SEQ ID NO: 2992 - DNA, 24 bp, Artificial sequence
  Primer
ccgtgactcatcgatgagtcacgg

SEQ ID NO: 2993 - DNA, 24 bp, Artificial sequence
  Primer
cggcgactcatcgatgagtcgccg

SEQ ID NO: 2994 - DNA, 24 bp, Artificial sequence
  Primer
cagcgactcatcgatgagtcgctg

SEQ ID NO: 2995 - DNA, 24 bp, Artificial sequence
  Primer
cgacgactcatcgatgagtcgtcg

SEQ ID NO: 2996 - DNA, 24 bp, Artificial sequence
  Primer
cggagactcatcgatgagtctccg

SEQ ID NO: 2997 - DNA, 24 bp, Artificial sequence
  Primer
ctgcgactcatcgatgagtcgcag

SEQ ID NO: 2998 - DNA, 24 bp, Artificial sequence
  Primer
cggtgactcatcgatgagtcaccg

SEQ ID NO: 2999 - DNA, 24 bp, Artificial sequence
  Primer
cacggactcatcgatgagtccgtg

SEQ ID NO: 3000 - DNA, 24 bp, Artificial sequence
  Primer
cccagactcatcgatgagtctggg

SEQ ID NO: 3001 - DNA, 24 bp, Artificial sequence
  Primer
ctcggactcatcgatgagtccgag

SEQ ID NO: 3002 - DNA, 24 bp, Artificial sequence
  Primer
ccctgactcatcgatgagtcaggg

SEQ ID NO: 3003 - DNA, 24 bp, Artificial sequence
  Primer
ccacgactcatcgatgagtcgtgg

SEQ ID NO: 3004 - DNA, 24 bp, Artificial sequence
  Primer
agccgactcatcgatgagtcggct

SEQ ID NO: 3005 - DNA, 24 bp, Artificial sequence
  Primer
tgccgactcatcgatgagtcggca

SEQ ID NO: 3006 - DNA, 24 bp, Artificial sequence
  Primer
gcgagactcatcgatgagtctcgc

SEQ ID NO: 3007 - DNA, 24 bp, Artificial sequence
  Primer
gcgtgactcatcgatgagtcacgc

SEQ ID NO: 3008 - DNA, 24 bp, Artificial sequence
  Primer
gcaggactcatcgatgagtcctgc

SEQ ID NO: 3009 - DNA, 24 bp, Artificial sequence
  Primer
gctggactcatcgatgagtccagc

SEQ ID NO: 3010 - DNA, 24 bp, Artificial sequence
  Primer
cgaggactcatcgatgagtcctcg

SEQ ID NO: 3011 - DNA, 24 bp, Artificial sequence
  Primer
cgtggactcatcgatgagtccacg

SEQ ID NO: 3012 - DNA, 24 bp, Artificial sequence
  Primer
caccgactcatcgatgagtcggtg

SEQ ID NO: 3013 - DNA, 24 bp, Artificial sequence
  Primer
ctccgactcatcgatgagtcggag

SEQ ID NO: 3014 - DNA, 24 bp, Artificial sequence
  Primer
gcgggactcatcgatgagtcccgc

SEQ ID NO: 3015 - DNA, 24 bp, Artificial sequence
  Primer
gagggactcatcgatgagtccctc

SEQ ID NO: 3016 - DNA, 24 bp, Artificial sequence
  Primer
gtgggactcatcgatgagtcccac

SEQ ID NO: 3017 - DNA, 24 bp, Artificial sequence
  Primer
  misc_feature (1)..(4): n is a, c, g, or t
  misc_feature (21)..(24): n is a, c, g, or t
nnnngactcttataagagtcnnnn

SEQ ID NO: 3018 - DNA, 24 bp, Artificial sequence
  Primer
ggcggactcttataagagtccgcc

SEQ ID NO: 3019 - DNA, 24 bp, Artificial sequence
  Primer
agcggactcttataagagtccgct

SEQ ID NO: 3020 - DNA, 24 bp, Artificial sequence
  Primer
gacggactcttataagagtccgtc

SEQ ID NO: 3021 - DNA, 24 bp, Artificial sequence
  Primer
ggaggactcttataagagtcctcc

SEQ ID NO: 3022 - DNA, 24 bp, Artificial sequence
  Primer
ggcagactcttataagagtctgcc

SEQ ID NO: 3023 - DNA, 24 bp, Artificial sequence
  Primer
tgcggactcttataagagtccgca

SEQ ID NO: 3024 - DNA, 24 bp, Artificial sequence
  Primer
gtcggactcttataagagtccgac

SEQ ID NO: 3025 - DNA, 24 bp, Artificial sequence
  Primer
ggtggactcttataagagtccacc

SEQ ID NO: 3026 - DNA, 24 bp, Artificial sequence
  Primer
ggctgactcttataagagtcagcc

SEQ ID NO: 3027 - DNA, 24 bp, Artificial sequence
  Primer
gcccgactcttataagagtcgggc

SEQ ID NO: 3028 - DNA, 24 bp, Artificial sequence
  Primer
acccgactcttataagagtcgggt

SEQ ID NO: 3029 - DNA, 24 bp, Artificial sequence
  Primer
gaccgactcttataagagtcggtc

SEQ ID NO: 3030 - DNA, 24 bp, Artificial sequence
  Primer
gcacgactcttataagagtcgtgc

SEQ ID NO: 3031 - DNA, 24 bp, Artificial sequence
  Primer
gccagactcttataagagtctggc

SEQ ID NO: 3032 - DNA, 24 bp, Artificial sequence
  Primer
tcccgactcttataagagtcggga

SEQ ID NO: 3033 - DNA, 24 bp, Artificial sequence
  Primer
gtccgactcttataagagtcggac

SEQ ID NO: 3034 - DNA, 24 bp, Artificial sequence
  Primer
gcctgactcttataagagtcaggc

SEQ ID NO: 3035 - DNA, 24 bp, Artificial sequence
  Primer
gggcgactcttataagagtcgccc

SEQ ID NO: 3036 - DNA, 24 bp, Artificial sequence
  Primer
aggcgactcttataagagtcgcct

SEQ ID NO: 3037 - DNA, 24 bp, Artificial sequence
  Primer
gagcgactcttataagagtcgctc

SEQ ID NO: 3038 - DNA, 24 bp, Artificial sequence
  Primer
ggacgactcttataagagtcgtcc

SEQ ID NO: 3039 - DNA, 24 bp, Artificial sequence
  Primer
gggagactcttataagagtctccc

SEQ ID NO: 3040 - DNA, 24 bp, Artificial sequence
  Primer
tggcgactcttataagagtcgcca

SEQ ID NO: 3041 - DNA, 24 bp, Artificial sequence
  Primer
gtgcgactcttataagagtcgcac

SEQ ID NO: 3042 - DNA, 24 bp, Artificial sequence
  Primer
gggtgactcttataagagtcaccc

SEQ ID NO: 3043 - DNA, 24 bp, Artificial sequence
  Primer
acgggactcttataagagtcccgt

SEQ ID NO: 3044 - DNA, 24 bp, Artificial sequence
  Primer
cagggactcttataagagtccctg

SEQ ID NO: 3045 - DNA, 24 bp, Artificial sequence
  Primer
ccaggactcttataagagtcctgg

SEQ ID NO: 3046 - DNA, 24 bp, Artificial sequence
  Primer
ccgagactcttataagagtctcgg

SEQ ID NO: 3047 - DNA, 24 bp, Artificial sequence
  Primer
tcgggactcttataagagtcccga

SEQ ID NO: 3048 - DNA, 24 bp, Artificial sequence
  Primer
ctgggactcttataagagtcccag

SEQ ID NO: 3049 - DNA, 24 bp, Artificial sequence
  Primer
cctggactcttataagagtccagg

SEQ ID NO: 3050 - DNA, 24 bp, Artificial sequence
  Primer
ccgtgactcttataagagtcacgg

SEQ ID NO: 3051 - DNA, 24 bp, Artificial sequence
  Primer
cggcgactcttataagagtcgccg

SEQ ID NO: 3052 - DNA, 24 bp, Artificial sequence
  Primer
cagcgactcttataagagtcgctg

SEQ ID NO: 3053 - DNA, 24 bp, Artificial sequence
  Primer
cgacgactcttataagagtcgtcg

SEQ ID NO: 3054 - DNA, 24 bp, Artificial sequence
  Primer
cggagactcttataagagtctccg

SEQ ID NO: 3055 - DNA, 24 bp, Artificial sequence
  Primer
ctgcgactcttataagagtcgcag

SEQ ID NO: 3056 - DNA, 24 bp, Artificial sequence
  Primer
cggtgactcttataagagtcaccg

SEQ ID NO: 3057 - DNA, 24 bp, Artificial sequence
  Primer
cacggactcttataagagtccgtg

SEQ ID NO: 3058 - DNA, 24 bp, Artificial sequence
  Primer
cccagactcttataagagtctggg

SEQ ID NO: 3059 - DNA, 24 bp, Artificial sequence
  Primer
ctcggactcttataagagtccgag

SEQ ID NO: 3060 - DNA, 24 bp, Artificial sequence
  Primer
ccctgactcttataagagtcaggg

SEQ ID NO: 3061 - DNA, 24 bp, Artificial sequence
  Primer
ccacgactcttataagagtcgtgg

SEQ ID NO: 3062 - DNA, 24 bp, Artificial sequence
  Primer
agccgactcttataagagtcggct

SEQ ID NO: 3063 - DNA, 24 bp, Artificial sequence
  Primer
tgccgactcttataagagtcggca

SEQ ID NO: 3064 - DNA, 24 bp, Artificial sequence
  Primer
gcgagactcttataagagtctcgc

SEQ ID NO: 3065 - DNA, 24 bp, Artificial sequence
  Primer
gcgtgactcttataagagtcacgc

SEQ ID NO: 3066 - DNA, 24 bp, Artificial sequence
  Primer
gcaggactcttataagagtcctgc

SEQ ID NO: 3067 - DNA, 24 bp, Artificial sequence
  Primer
gctggactcttataagagtccagc

SEQ ID NO: 3068 - DNA, 24 bp, Artificial sequence
  Primer
cgaggactcttataagagtcctcg

SEQ ID NO: 3069 - DNA, 24 bp, Artificial sequence
  Primer
cgtggactcttataagagtccacg

SEQ ID NO: 3070 - DNA, 24 bp, Artificial sequence
  Primer
caccgactcttataagagtcggtg

SEQ ID NO: 3071 - DNA, 24 bp, Artificial sequence
  Primer
ctccgactcttataagagtcggag

SEQ ID NO: 3072 - DNA, 24 bp, Artificial sequence
  Primer
gcgggactcttataagagtcccgc

SEQ ID NO: 3073 - DNA, 24 bp, Artificial sequence
  Primer
gagggactcttataagagtccctc

SEQ ID NO: 3074 - DNA, 24 bp, Artificial sequence
  Primer
gtgggactcttataagagtcccac

SEQ ID NO: 3075 - DNA, 24 bp, Artificial sequence
  Primer
  misc_feature (1)..(4): n is a, c, g, or t
  misc_feature (21)..(24): n is a, c, g, or t
nnnngactctttaaagagtcnnnn

SEQ ID NO: 3076 - DNA, 24 bp, Artificial sequence
  Primer
ggcggactctttaaagagtccgcc

SEQ ID NO: 3077 - DNA, 24 bp, Artificial sequence
  Primer
agcggactctttaaagagtccgct

SEQ ID NO: 3078 - DNA, 24 bp, Artificial sequence
  Primer
gacggactctttaaagagtccgtc

SEQ ID NO: 3079 - DNA, 24 bp, Artificial sequence
  Primer
ggaggactctttaaagagtcctcc

SEQ ID NO: 3080 - DNA, 24 bp, Artificial sequence
  Primer
ggcagactctttaaagagtctgcc

SEQ ID NO: 3081 - DNA, 24 bp, Artificial sequence
  Primer
tgcggactctttaaagagtccgca

SEQ ID NO: 3082 - DNA, 24 bp, Artificial sequence
  Primer
gtcggactctttaaagagtccgac

SEQ ID NO: 3083 - DNA, 24 bp, Artificial sequence
  Primer
ggtggactctttaaagagtccacc

SEQ ID NO: 3084 - DNA, 24 bp, Artificial sequence
  Primer
ggctgactctttaaagagtcagcc

SEQ ID NO: 3085 - DNA, 24 bp, Artificial sequence
  Primer
gcccgactctttaaagagtcgggc

SEQ ID NO: 3086 - DNA, 24 bp, Artificial sequence
  Primer
acccgactctttaaagagtcgggt

SEQ ID NO: 3087 - DNA, 24 bp, Artificial sequence
  Primer
gaccgactctttaaagagtcggtc

SEQ ID NO: 3088 - DNA, 24 bp, Artificial sequence
  Primer
gcacgactctttaaagagtcgtgc

SEQ ID NO: 3089 - DNA, 24 bp, Artificial sequence
  Primer
gccagactctttaaagagtctggc

SEQ ID NO: 3090 - DNA, 24 bp, Artificial sequence
  Primer
tcccgactctttaaagagtcggga

SEQ ID NO: 3091 - DNA, 24 bp, Artificial sequence
  Primer
gtccgactctttaaagagtcggac

SEQ ID NO: 3092 - DNA, 24 bp, Artificial sequence
  Primer
gcctgactctttaaagagtcaggc

SEQ ID NO: 3093 - DNA, 24 bp, Artificial sequence
  Primer
gggcgactctttaaagagtcgccc

SEQ ID NO: 3094 - DNA, 24 bp, Artificial sequence
  Primer
aggcgactctttaaagagtcgcct

SEQ ID NO: 3095 - DNA, 24 bp, Artificial sequence
  Primer
gagcgactctttaaagagtcgctc

SEQ ID NO: 3096 - DNA, 24 bp, Artificial sequence
  Primer
ggacgactctttaaagagtcgtcc

SEQ ID NO: 3097 - DNA, 24 bp, Artificial sequence
  Primer
gggagactctttaaagagtctccc

SEQ ID NO: 3098 - DNA, 24 bp, Artificial sequence
  Primer
tggcgactctttaaagagtcgcca

SEQ ID NO: 3099 - DNA, 24 bp, Artificial sequence
  Primer
gtgcgactctttaaagagtcgcac

SEQ ID NO: 3100 - DNA, 24 bp, Artificial sequence
  Primer
gggtgactctttaaagagtcaccc

SEQ ID NO: 3101 - DNA, 24 bp, Artificial sequence
  Primer
acgggactctttaaagagtcccgt

SEQ ID NO: 3102 - DNA, 24 bp, Artificial sequence
  Primer
cagggactctttaaagagtccctg

SEQ ID NO: 3103 - DNA, 24 bp, Artificial sequence
  Primer
ccaggactctttaaagagtcctgg

SEQ ID NO: 3104 - DNA, 24 bp, Artificial sequence
  Primer
ccgagactctttaaagagtctcgg

SEQ ID NO: 3105 - DNA, 24 bp, Artificial sequence
  Primer
tcgggactctttaaagagtcccga

SEQ ID NO: 3106 - DNA, 24 bp, Artificial sequence
  Primer
ctgggactctttaaagagtcccag

SEQ ID NO: 3107 - DNA, 24 bp, Artificial sequence
  Primer
cctggactctttaaagagtccagg

SEQ ID NO: 3108 - DNA, 24 bp, Artificial sequence
  Primer
ccgtgactctttaaagagtcacgg

SEQ ID NO: 3109 - DNA, 24 bp, Artificial sequence
  Primer
cggcgactctttaaagagtcgccg

SEQ ID NO: 3110 - DNA, 24 bp, Artificial sequence
  Primer
cagcgactctttaaagagtcgctg

SEQ ID NO: 3111 - DNA, 24 bp, Artificial sequence
  Primer
cgacgactctttaaagagtcgtcg

SEQ ID NO: 3112 - DNA, 24 bp, Artificial sequence
  Primer
cggagactctttaaagagtctccg

SEQ ID NO: 3113 - DNA, 24 bp, Artificial sequence
  Primer
ctgcgactctttaaagagtcgcag

SEQ ID NO: 3114 - DNA, 24 bp, Artificial sequence
  Primer
cggtgactctttaaagagtcaccg

SEQ ID NO: 3115 - DNA, 24 bp, Artificial sequence
  Primer
cacggactctttaaagagtccgtg

SEQ ID NO: 3116 - DNA, 24 bp, Artificial sequence
  Primer
cccagactctttaaagagtctggg

SEQ ID NO: 3117 - DNA, 24 bp, Artificial sequence
  Primer
ctcggactctttaaagagtccgag

SEQ ID NO: 3118 - DNA, 24 bp, Artificial sequence
  Primer
ccctgactctttaaagagtcaggg

SEQ ID NO: 3119 - DNA, 24 bp, Artificial sequence
  Primer
ccacgactctttaaagagtcgtgg

SEQ ID NO: 3120 - DNA, 24 bp, Artificial sequence
  Primer
agccgactctttaaagagtcggct

SEQ ID NO: 3121 - DNA, 24 bp, Artificial sequence
  Primer
tgccgactctttaaagagtcggca

SEQ ID NO: 3122 - DNA, 24 bp, Artificial sequence
  Primer
gcgagactctttaaagagtctcgc

SEQ ID NO: 3123 - DNA, 24 bp, Artificial sequence
  Primer
gcgtgactctttaaagagtcacgc

SEQ ID NO: 3124 - DNA, 24 bp, Artificial sequence
  Primer
gcaggactctttaaagagtcctgc

SEQ ID NO: 3125 - DNA, 24 bp, Artificial sequence
  Primer
gctggactctttaaagagtccagc

SEQ ID NO: 3126 - DNA, 24 bp, Artificial sequence
  Primer
cgaggactctttaaagagtcctcg

SEQ ID NO: 3127 - DNA, 24 bp, Artificial sequence
  Primer
cgtggactctttaaagagtccacg

SEQ ID NO: 3128 - DNA, 24 bp, Artificial sequence
  Primer
caccgactctttaaagagtcggtg

SEQ ID NO: 3129 - DNA, 24 bp, Artificial sequence
  Primer
ctccgactctttaaagagtcggag

SEQ ID NO: 3130 - DNA, 24 bp, Artificial sequence
  Primer
gcgggactctttaaagagtcccgc

SEQ ID NO: 3131 - DNA, 24 bp, Artificial sequence
  Primer
gagggactctttaaagagtccctc

SEQ ID NO: 3132 - DNA, 24 bp, Artificial sequence
  Primer
gtgggactctttaaagagtcccac

SEQ ID NO: 3133 - DNA, 24 bp, Artificial sequence
  Primer
  misc_feature (1)..(4): n is a, c, g, or t
  misc_feature (21)..(24): n is a, c, g, or t
nnnngactcttgcaagagtcnnnn

SEQ ID NO: 3134 - DNA, 24 bp, Artificial sequence
  Primer
ggcggactcttgcaagagtccgcc

SEQ ID NO: 3135 - DNA, 24 bp, Artificial sequence
  Primer
agcggactcttgcaagagtccgct

SEQ ID NO: 3136 - DNA, 24 bp, Artificial sequence
  Primer
gacggactcttgcaagagtccgtc

SEQ ID NO: 3137 - DNA, 24 bp, Artificial sequence
  Primer
ggaggactcttgcaagagtcctcc

SEQ ID NO: 3138 - DNA, 24 bp, Artificial sequence
  Primer
ggcagactcttgcaagagtctgcc

SEQ ID NO: 3139 - DNA, 24 bp, Artificial sequence
  Primer
tgcggactcttgcaagagtccgca

SEQ ID NO: 3140 - DNA, 24 bp, Artificial sequence
  Primer
gtcggactcttgcaagagtccgac

SEQ ID NO: 3141 - DNA, 24 bp, Artificial sequence
  Primer
ggtggactcttgcaagagtccacc

SEQ ID NO: 3142 - DNA, 24 bp, Artificial sequence
  Primer
ggctgactcttgcaagagtcagcc

SEQ ID NO: 3143 - DNA, 24 bp, Artificial sequence
  Primer
gcccgactcttgcaagagtcgggc

SEQ ID NO: 3144 - DNA, 24 bp, Artificial sequence
  Primer
acccgactcttgcaagagtcgggt

SEQ ID NO: 3145 - DNA, 24 bp, Artificial sequence
  Primer
gaccgactcttgcaagagtcggtc

SEQ ID NO: 3146 - DNA, 24 bp, Artificial sequence
  Primer
gcacgactcttgcaagagtcgtgc

SEQ ID NO: 3147 - DNA, 24 bp, Artificial sequence
  Primer
gccagactcttgcaagagtctggc

SEQ ID NO: 3148 - DNA, 24 bp, Artificial sequence
  Primer
tcccgactcttgcaagagtcggga

SEQ ID NO: 3149 - DNA, 24 bp, Artificial sequence
  Primer
gtccgactcttgcaagagtcggac

SEQ ID NO: 3150 - DNA, 24 bp, Artificial sequence
  Primer
gcctgactcttgcaagagtcaggc

SEQ ID NO: 3151 - DNA, 24 bp, Artificial sequence
  Primer
gggcgactcttgcaagagtcgccc

SEQ ID NO: 3152 - DNA, 24 bp, Artificial sequence
  Primer
aggcgactcttgcaagagtcgcct

SEQ ID NO: 3153 - DNA, 24 bp, Artificial sequence
  Primer
gagcgactcttgcaagagtcgctc

SEQ ID NO: 3154 - DNA, 24 bp, Artificial sequence
  Primer
ggacgactcttgcaagagtcgtcc

SEQ ID NO: 3155 - DNA, 24 bp, Artificial sequence
  Primer
gggagactcttgcaagagtctccc

SEQ ID NO: 3156 - DNA, 24 bp, Artificial sequence
  Primer
tggcgactcttgcaagagtcgcca

SEQ ID NO: 3157 - DNA, 24 bp, Artificial sequence
  Primer
gtgcgactcttgcaagagtcgcac

SEQ ID NO: 3158 - DNA, 24 bp, Artificial sequence
  Primer
gggtgactcttgcaagagtcaccc

SEQ ID NO: 3159 - DNA, 24 bp, Artificial sequence
  Primer
acgggactcttgcaagagtcccgt

SEQ ID NO: 3160 - DNA, 24 bp, Artificial sequence
  Primer
cagggactcttgcaagagtccctg

SEQ ID NO: 3161 - DNA, 24 bp, Artificial sequence
  Primer
ccaggactcttgcaagagtcctgg

SEQ ID NO: 3162 - DNA, 24 bp, Artificial sequence
  Primer
ccgagactcttgcaagagtctcgg

SEQ ID NO: 3163 - DNA, 24 bp, Artificial sequence
  Primer
tcgggactcttgcaagagtcccga

SEQ ID NO: 3164 - DNA, 24 bp, Artificial sequence
  Primer
ctgggactcttgcaagagtcccag

SEQ ID NO: 3165 - DNA, 24 bp, Artificial sequence
  Primer
cctggactcttgcaagagtccagg

SEQ ID NO: 3166 - DNA, 24 bp, Artificial sequence
  Primer
ccgtgactcttgcaagagtcacgg

SEQ ID NO: 3167 - DNA, 24 bp, Artificial sequence
  Primer
cggcgactcttgcaagagtcgccg

SEQ ID NO: 3168 - DNA, 24 bp, Artificial sequence
  Primer
cagcgactcttgcaagagtcgctg

SEQ ID NO: 3169 - DNA, 24 bp, Artificial sequence
  Primer
cgacgactcttgcaagagtcgtcg

SEQ ID NO: 3170 - DNA, 24 bp, Artificial sequence
  Primer
cggagactcttgcaagagtctccg

SEQ ID NO: 3171 - DNA, 24 bp, Artificial sequence
  Primer
ctgcgactcttgcaagagtcgcag

SEQ ID NO: 3172 - DNA, 24 bp, Artificial sequence
  Primer
cggtgactcttgcaagagtcaccg

SEQ ID NO: 3173 - DNA, 24 bp, Artificial sequence
  Primer
cacggactcttgcaagagtccgtg

SEQ ID NO: 3174 - DNA, 24 bp, Artificial sequence
  Primer
cccagactcttgcaagagtctggg

SEQ ID NO: 3175 - DNA, 24 bp, Artificial sequence
  Primer
ctcggactcttgcaagagtccgag

SEQ ID NO: 3176 - DNA, 24 bp, Artificial sequence
  Primer
ccctgactcttgcaagagtcaggg

SEQ ID NO: 3177 - DNA, 24 bp, Artificial sequence
  Primer
ccacgactcttgcaagagtcgtgg

SEQ ID NO: 3178 - DNA, 24 bp, Artificial sequence
  Primer
agccgactcttgcaagagtcggct

SEQ ID NO: 3179 - DNA, 24 bp, Artificial sequence
  Primer
tgccgactcttgcaagagtcggca

SEQ ID NO: 3180 - DNA, 24 bp, Artificial sequence
  Primer
gcgagactcttgcaagagtctcgc

SEQ ID NO: 3181 - DNA, 24 bp, Artificial sequence
  Primer
gcgtgactcttgcaagagtcacgc

SEQ ID NO: 3182 - DNA, 24 bp, Artificial sequence
  Primer
gcaggactcttgcaagagtcctgc

SEQ ID NO: 3183 - DNA, 24 bp, Artificial sequence
  Primer
gctggactcttgcaagagtccagc

SEQ ID NO: 3184 - DNA, 24 bp, Artificial sequence
  Primer
cgaggactcttgcaagagtcctcg

SEQ ID NO: 3185 - DNA, 24 bp, Artificial sequence
  Primer
cgtggactcttgcaagagtccacg

SEQ ID NO: 3186 - DNA, 24 bp, Artificial sequence
  Primer
caccgactcttgcaagagtcggtg

SEQ ID NO: 3187 - DNA, 24 bp, Artificial sequence
  Primer
ctccgactcttgcaagagtcggag

SEQ ID NO: 3188 - DNA, 24 bp, Artificial sequence
  Primer
gcgggactcttgcaagagtcccgc

SEQ ID NO: 3189 - DNA, 24 bp, Artificial sequence
  Primer
gagggactcttgcaagagtccctc

SEQ ID NO: 3190 - DNA, 24 bp, Artificial sequence
  Primer
gtgggactcttgcaagagtcccac

SEQ ID NO: 3191 - DNA, 24 bp, Artificial sequence
  Primer
  misc_feature (1)..(4): n is a, c, g, or t
  misc_feature (21)..(24): n is a, c, g, or t
nnnngactcttcgaagagtcnnnn

SEQ ID NO: 3192 - DNA, 24 bp, Artificial sequence
  Primer
ggcggactcttcgaagagtccgcc

SEQ ID NO: 3193 - DNA, 24 bp, Artificial sequence
  Primer
agcggactcttcgaagagtccgct

SEQ ID NO: 3194 - DNA, 24 bp, Artificial sequence
  Primer
gacggactcttcgaagagtccgtc

SEQ ID NO: 3195 - DNA, 24 bp, Artificial sequence
  Primer
ggaggactcttcgaagagtcctcc

SEQ ID NO: 3196 - DNA, 24 bp, Artificial sequence
  Primer
ggcagactcttcgaagagtctgcc

SEQ ID NO: 3197 - DNA, 24 bp, Artificial sequence
  Primer
tgcggactcttcgaagagtccgca

SEQ ID NO: 3198 - DNA, 24 bp, Artificial sequence
  Primer
gtcggactcttcgaagagtccgac

SEQ ID NO: 3199 - DNA, 24 bp, Artificial sequence
  Primer
ggtggactcttcgaagagtccacc

SEQ ID NO: 3200 - DNA, 24 bp, Artificial sequence
  Primer
ggctgactcttcgaagagtcagcc

SEQ ID NO: 3201 - DNA, 24 bp, Artificial sequence
  Primer
gcccgactcttcgaagagtcgggc

SEQ ID NO: 3202 - DNA, 24 bp, Artificial sequence
  Primer
acccgactcttcgaagagtcgggt

SEQ ID NO: 3203 - DNA, 24 bp, Artificial sequence
  Primer
gaccgactcttcgaagagtcggtc

SEQ ID NO: 3204 - DNA, 24 bp, Artificial sequence
  Primer
gcacgactcttcgaagagtcgtgc

SEQ ID NO: 3205 - DNA, 24 bp, Artificial sequence
  Primer
gccagactcttcgaagagtctggc

SEQ ID NO: 3206 - DNA, 24 bp, Artificial sequence
  Primer
tcccgactcttcgaagagtcggga

SEQ ID NO: 3207 - DNA, 24 bp, Artificial sequence
  Primer
gtccgactcttcgaagagtcggac

SEQ ID NO: 3208 - DNA, 24 bp, Artificial sequence
  Primer
gcctgactcttcgaagagtcaggc

SEQ ID NO: 3209 - DNA, 24 bp, Artificial sequence
  Primer
gggcgactcttcgaagagtcgccc

SEQ ID NO: 3210 - DNA, 24 bp, Artificial sequence
  Primer
aggcgactcttcgaagagtcgcct

SEQ ID NO: 3211 - DNA, 24 bp, Artificial sequence
  Primer
gagcgactcttcgaagagtcgctc

SEQ ID NO: 3212 - DNA, 24 bp, Artificial sequence
  Primer
ggacgactcttcgaagagtcgtcc

SEQ ID NO: 3213 - DNA, 24 bp, Artificial sequence
  Primer
gggagactcttcgaagagtctccc

SEQ ID NO: 3214 - DNA, 24 bp, Artificial sequence
  Primer
tggcgactcttcgaagagtcgcca

SEQ ID NO: 3215 - DNA, 24 bp, Artificial sequence
  Primer
gtgcgactcttcgaagagtcgcac

SEQ ID NO: 3216 - DNA, 24 bp, Artificial sequence
  Primer
gggtgactcttcgaagagtcaccc

SEQ ID NO: 3217 - DNA, 24 bp, Artificial sequence
  Primer
acgggactcttcgaagagtcccgt

SEQ ID NO: 3218 - DNA, 24 bp, Artificial sequence
  Primer
cagggactcttcgaagagtccctg

SEQ ID NO: 3219 - DNA, 24 bp, Artificial sequence
  Primer
ccaggactcttcgaagagtcctgg

SEQ ID NO: 3220 - DNA, 24 bp, Artificial sequence
  Primer
ccgagactcttcgaagagtctcgg

SEQ ID NO: 3221 - DNA, 24 bp, Artificial sequence
  Primer
tcgggactcttcgaagagtcccga

SEQ ID NO: 3222 - DNA, 24 bp, Artificial sequence
  Primer
ctgggactcttcgaagagtcccag

SEQ ID NO: 3223 - DNA, 24 bp, Artificial sequence
  Primer
cctggactcttcgaagagtccagg

SEQ ID NO: 3224 - DNA, 24 bp, Artificial sequence
  Primer
ccgtgactcttcgaagagtcacgg

SEQ ID NO: 3225 - DNA, 24 bp, Artificial sequence
  Primer
cggcgactcttcgaagagtcgccg

SEQ ID NO: 3226 - DNA, 24 bp, Artificial sequence
  Primer
cagcgactcttcgaagagtcgctg

SEQ ID NO: 3227 - DNA, 24 bp, Artificial sequence
  Primer
cgacgactcttcgaagagtcgtcg

SEQ ID NO: 3228 - DNA, 24 bp, Artificial sequence
  Primer
cggagactcttcgaagagtctccg

SEQ ID NO: 3229 - DNA, 24 bp, Artificial sequence
  Primer
ctgcgactcttcgaagagtcgcag

SEQ ID NO: 3230 - DNA, 24 bp, Artificial sequence
  Primer
cggtgactcttcgaagagtcaccg

SEQ ID NO: 3231 - DNA, 24 bp, Artificial sequence
  Primer
cacggactcttcgaagagtccgtg

SEQ ID NO: 3232 - DNA, 24 bp, Artificial sequence
  Primer
cccagactcttcgaagagtctggg

SEQ ID NO: 3233 - DNA, 24 bp, Artificial sequence
  Primer
ctcggactcttcgaagagtccgag

SEQ ID NO: 3234 - DNA, 24 bp, Artificial sequence
  Primer
ccctgactcttcgaagagtcaggg

SEQ ID NO: 3235 - DNA, 24 bp, Artificial sequence
  Primer
ccacgactcttcgaagagtcgtgg

SEQ ID NO: 3236 - DNA, 24 bp, Artificial sequence
  Primer
agccgactcttcgaagagtcggct

SEQ ID NO: 3237 - DNA, 24 bp, Artificial sequence
  Primer
tgccgactcttcgaagagtcggca

SEQ ID NO: 3238 - DNA, 24 bp, Artificial sequence
  Primer
gcgagactcttcgaagagtctcgc

SEQ ID NO: 3239 - DNA, 24 bp, Artificial sequence
  Primer
gcgtgactcttcgaagagtcacgc

SEQ ID NO: 3240 - DNA, 24 bp, Artificial sequence
  Primer
gcaggactcttcgaagagtcctgc

SEQ ID NO: 3241 - DNA, 24 bp, Artificial sequence
  Primer
gctggactcttcgaagagtccagc

SEQ ID NO: 3242 - DNA, 24 bp, Artificial sequence
  Primer
cgaggactcttcgaagagtcctcg

SEQ ID NO: 3243 - DNA, 24 bp, Artificial sequence
  Primer
cgtggactcttcgaagagtccacg

SEQ ID NO: 3244 - DNA, 24 bp, Artificial sequence
  Primer
caccgactcttcgaagagtcggtg

SEQ ID NO: 3245 - DNA, 24 bp, Artificial sequence
  Primer
ctccgactcttcgaagagtcggag

SEQ ID NO: 3246 - DNA, 24 bp, Artificial sequence
  Primer
gcgggactcttcgaagagtcccgc

SEQ ID NO: 3247 - DNA, 24 bp, Artificial sequence
  Primer
gagggactcttcgaagagtccctc

SEQ ID NO: 3248 - DNA, 24 bp, Artificial sequence
  Primer
gtgggactcttcgaagagtcccac

SEQ ID NO: 3249 - DNA, 23 bp, Artificial sequence
  Primer
  misc_feature (1)..(3): n is a, c, g, or t
  misc_feature (20)..(23): n is a, c, g, or t
nnngactccgatcggagtcnnnn

SEQ ID NO: 3250 - DNA, 23 bp, Artificial sequence
  Primer
gcggactccgatcggagtccgcc

SEQ ID NO: 3251 - DNA, 23 bp, Artificial sequence
  Primer
gcggactccgatcggagtccgct

SEQ ID NO: 3252 - DNA, 23 bp, Artificial sequence
  Primer
acggactccgatcggagtccgtc

SEQ ID NO: 3253 - DNA, 23 bp, Artificial sequence
  Primer
gaggactccgatcggagtcctcc

SEQ ID NO: 3254 - DNA, 23 bp, Artificial sequence
  Primer
gcagactccgatcggagtctgcc

SEQ ID NO: 3255 - DNA, 23 bp, Artificial sequence
  Primer
gcggactccgatcggagtccgca

SEQ ID NO: 3256 - DNA, 23 bp, Artificial sequence
  Primer
tcggactccgatcggagtccgac

SEQ ID NO: 3257 - DNA, 23 bp, Artificial sequence
  Primer
gtggactccgatcggagtccacc

SEQ ID NO: 3258 - DNA, 23 bp, Artificial sequence
  Primer
gctgactccgatcggagtcagcc

SEQ ID NO: 3259 - DNA, 23 bp, Artificial sequence
  Primer
cccgactccgatcggagtcgggc

SEQ ID NO: 3260 - DNA, 23 bp, Artificial sequence
  Primer
cccgactccgatcggagtcgggt

SEQ ID NO: 3261 - DNA, 23 bp, Artificial sequence
  Primer
accgactccgatcggagtcggtc

SEQ ID NO: 3262 - DNA, 23 bp, Artificial sequence
  Primer
cacgactccgatcggagtcgtgc

SEQ ID NO: 3263 - DNA, 23 bp, Artificial sequence
  Primer
ccagactccgatcggagtctggc

SEQ ID NO: 3264 - DNA, 23 bp, Artificial sequence
  Primer
cccgactccgatcggagtcggga

SEQ ID NO: 3265 - DNA, 23 bp, Artificial sequence
  Primer
tccgactccgatcggagtcggac

SEQ ID NO: 3266 - DNA, 23 bp, Artificial sequence
  Primer
cctgactccgatcggagtcaggc

SEQ ID NO: 3267 - DNA, 23 bp, Artificial sequence
  Primer
ggcgactccgatcggagtcgccc

SEQ ID NO: 3268 - DNA, 23 bp, Artificial sequence
  Primer
ggcgactccgatcggagtcgcct

SEQ ID NO: 3269 - DNA, 23 bp, Artificial sequence
  Primer
agcgactccgatcggagtcgctc

SEQ ID NO: 3270 - DNA, 23 bp, Artificial sequence
  Primer
gacgactccgatcggagtcgtcc

SEQ ID NO: 3271 - DNA, 23 bp, Artificial sequence
  Primer
ggagactccgatcggagtctccc

SEQ ID NO: 3272 - DNA, 23 bp, Artificial sequence
  Primer
ggcgactccgatcggagtcgcca

SEQ ID NO: 3273 - DNA, 23 bp, Artificial sequence
  Primer
tgcgactccgatcggagtcgcac

SEQ ID NO: 3274 - DNA, 23 bp, Artificial sequence
  Primer
ggtgactccgatcggagtcaccc

SEQ ID NO: 3275 - DNA, 23 bp, Artificial sequence
  Primer
cgggactccgatcggagtcccgt

SEQ ID NO: 3276 - DNA, 23 bp, Artificial sequence
  Primer
agggactccgatcggagtccctg

SEQ ID NO: 3277 - DNA, 23 bp, Artificial sequence
  Primer
caggactccgatcggagtcctgg

SEQ ID NO: 3278 - DNA, 23 bp, Artificial sequence
  Primer
cgagactccgatcggagtctcgg

SEQ ID NO: 3279 - DNA, 23 bp, Artificial sequence
  Primer
cgggactccgatcggagtcccga

SEQ ID NO: 3280 - DNA, 23 bp, Artificial sequence
  Primer
tgggactccgatcggagtcccag

SEQ ID NO: 3281 - DNA, 23 bp, Artificial sequence
  Primer
ctggactccgatcggagtccagg

SEQ ID NO: 3282 - DNA, 23 bp, Artificial sequence
  Primer
cgtgactccgatcggagtcacgg

SEQ ID NO: 3283 - DNA, 23 bp, Artificial sequence
  Primer
ggcgactccgatcggagtcgccg

SEQ ID NO: 3284 - DNA, 23 bp, Artificial sequence
  Primer
agcgactccgatcggagtcgctg

SEQ ID NO: 3285 - DNA, 23 bp, Artificial sequence
  Primer
gacgactccgatcggagtcgtcg

SEQ ID NO: 3286 - DNA, 23 bp, Artificial sequence
  Primer
ggagactccgatcggagtctccg

SEQ ID NO: 3287 - DNA, 23 bp, Artificial sequence
  Primer
tgcgactccgatcggagtcgcag

SEQ ID NO: 3288 - DNA, 23 bp, Artificial sequence
  Primer
ggtgactccgatcggagtcaccg

SEQ ID NO: 3289 - DNA, 23 bp, Artificial sequence
  Primer
acggactccgatcggagtccgtg

SEQ ID NO: 3290 - DNA, 23 bp, Artificial sequence
  Primer
ccagactccgatcggagtctggg

SEQ ID NO: 3291 - DNA, 23 bp, Artificial sequence
  Primer
tcggactccgatcggagtccgag

SEQ ID NO: 3292 - DNA, 23 bp, Artificial sequence
  Primer
cctgactccgatcggagtcaggg

SEQ ID NO: 3293 - DNA, 23 bp, Artificial sequence
  Primer
cacgactccgatcggagtcgtgg

SEQ ID NO: 3294 - DNA, 23 bp, Artificial sequence
  Primer
gccgactccgatcggagtcggct

SEQ ID NO: 3295 - DNA, 23 bp, Artificial sequence
  Primer
gccgactccgatcggagtcggca

SEQ ID NO: 3296 - DNA, 23 bp, Artificial sequence
  Primer
cgagactccgatcggagtctcgc

SEQ ID NO: 3297 - DNA, 23 bp, Artificial sequence
  Primer
cgtgactccgatcggagtcacgc

SEQ ID NO: 3298 - DNA, 23 bp, Artificial sequence
  Primer
caggactccgatcggagtcctgc

SEQ ID NO: 3299 - DNA, 23 bp, Artificial sequence
  Primer
ctggactccgatcggagtccagc

SEQ ID NO: 3300 - DNA, 23 bp, Artificial sequence
  Primer
gaggactccgatcggagtcctcg

SEQ ID NO: 3301 - DNA, 23 bp, Artificial sequence
  Primer
gtggactccgatcggagtccacg

SEQ ID NO: 3302 - DNA, 23 bp, Artificial sequence
  Primer
accgactccgatcggagtcggtg

SEQ ID NO: 3303 - DNA, 23 bp, Artificial sequence
  Primer
tccgactccgatcggagtcggag

SEQ ID NO: 3304 - DNA, 23 bp, Artificial sequence
  Primer
cgggactccgatcggagtcccgc

SEQ ID NO: 3305 - DNA, 23 bp, Artificial sequence
  Primer
agggactccgatcggagtccctc

SEQ ID NO: 3306 - DNA, 23 bp, Artificial sequence
  Primer
tgggactccgatcggagtcccac

SEQ ID NO: 3307 - DNA, 23 bp, Artificial sequence
  Primer
  misc_feature (1)..(3): n is a, c, g, or t
  misc_feature (20)..(23): n is a, c, g, or t
nnngactccgtacggagtcnnnn

SEQ ID NO: 3308 - DNA, 23 bp, Artificial sequence
  Primer
gcggactccgtacggagtccgcc

SEQ ID NO: 3309 - DNA, 23 bp, Artificial sequence
  Primer
gcggactccgtacggagtccgct

SEQ ID NO: 3310 - DNA, 23 bp, Artificial sequence
  Primer
acggactccgtacggagtccgtc

SEQ ID NO: 3311 - DNA, 23 bp, Artificial sequence
  Primer
gaggactccgtacggagtcctcc

SEQ ID NO: 3312 - DNA, 23 bp, Artificial sequence
  Primer
gcagactccgtacggagtctgcc

SEQ ID NO: 3313 - DNA, 23 bp, Artificial sequence
  Primer
gcggactccgtacggagtccgca

SEQ ID NO: 3314 - DNA, 23 bp, Artificial sequence
  Primer
tcggactccgtacggagtccgac

SEQ ID NO: 3315 - DNA, 23 bp, Artificial sequence
  Primer
gtggactccgtacggagtccacc

SEQ ID NO: 3316 - DNA, 23 bp, Artificial sequence
  Primer
gctgactccgtacggagtcagcc

SEQ ID NO: 3317 - DNA, 23 bp, Artificial sequence
  Primer
cccgactccgtacggagtcgggc

SEQ ID NO: 3318 - DNA, 23 bp, Artificial sequence
  Primer
cccgactccgtacggagtcgggt

SEQ ID NO: 3319 - DNA, 23 bp, Artificial sequence
  Primer
accgactccgtacggagtcggtc

SEQ ID NO: 3320 - DNA, 23 bp, Artificial sequence
  Primer
cacgactccgtacggagtcgtgc

SEQ ID NO: 3321 - DNA, 23 bp, Artificial sequence
  Primer
ccagactccgtacggagtctggc

SEQ ID NO: 3322 - DNA, 23 bp, Artificial sequence
  Primer
cccgactccgtacggagtcggga

SEQ ID NO: 3323 - DNA, 23 bp, Artificial sequence
  Primer
tccgactccgtacggagtcggac

SEQ ID NO: 3324 - DNA, 23 bp, Artificial sequence
  Primer
cctgactccgtacggagtcaggc

SEQ ID NO: 3325 - DNA, 23 bp, Artificial sequence
  Primer
ggcgactccgtacggagtcgccc

SEQ ID NO: 3326 - DNA, 23 bp, Artificial sequence
  Primer
ggcgactccgtacggagtcgcct

SEQ ID NO: 3327 - DNA, 23 bp, Artificial sequence
  Primer
agcgactccgtacggagtcgctc

SEQ ID NO: 3328 - DNA, 23 bp, Artificial sequence
  Primer
gacgactccgtacggagtcgtcc

SEQ ID NO: 3329 - DNA, 23 bp, Artificial sequence
  Primer
ggagactccgtacggagtctccc

SEQ ID NO: 3330 - DNA, 23 bp, Artificial sequence
  Primer
ggcgactccgtacggagtcgcca

SEQ ID NO: 3331 - DNA, 23 bp, Artificial sequence
  Primer
tgcgactccgtacggagtcgcac

SEQ ID NO: 3332 - DNA, 23 bp, Artificial sequence
  Primer
ggtgactccgtacggagtcaccc

SEQ ID NO: 3333 - DNA, 23 bp, Artificial sequence
  Primer
cgggactccgtacggagtcccgt

SEQ ID NO: 3334 - DNA, 23 bp, Artificial sequence
  Primer
agggactccgtacggagtccctg

SEQ ID NO: 3335 - DNA, 23 bp, Artificial sequence
  Primer
caggactccgtacggagtcctgg

SEQ ID NO: 3336 - DNA, 23 bp, Artificial sequence
  Primer
cgagactccgtacggagtctcgg

SEQ ID NO: 3337 - DNA, 23 bp, Artificial sequence
  Primer
cgggactccgtacggagtcccga

SEQ ID NO: 3338 - DNA, 23 bp, Artificial sequence
  Primer
tgggactccgtacggagtcccag

SEQ ID NO: 3339 - DNA, 23 bp, Artificial sequence
  Primer
ctggactccgtacggagtccagg

SEQ ID NO: 3340 - DNA, 23 bp, Artificial sequence
  Primer
cgtgactccgtacggagtcacgg

SEQ ID NO: 3341 - DNA, 23 bp, Artificial sequence
  Primer
ggcgactccgtacggagtcgccg

SEQ ID NO: 3342 - DNA, 23 bp, Artificial sequence
  Primer
agcgactccgtacggagtcgctg

SEQ ID NO: 3343 - DNA, 23 bp, Artificial sequence
  Primer
gacgactccgtacggagtcgtcg

SEQ ID NO: 3344 - DNA, 23 bp, Artificial sequence
  Primer
ggagactccgtacggagtctccg

SEQ ID NO: 3345 - DNA, 23 bp, Artificial sequence
  Primer
tgcgactccgtacggagtcgcag

SEQ ID NO: 3346 - DNA, 23 bp, Artificial sequence
  Primer
ggtgactccgtacggagtcaccg

SEQ ID NO: 3347 - DNA, 23 bp, Artificial sequence
  Primer
acggactccgtacggagtccgtg

SEQ ID NO: 3348 - DNA, 23 bp, Artificial sequence
  Primer
ccagactccgtacggagtctggg

SEQ ID NO: 3349 - DNA, 23 bp, Artificial sequence
  Primer
tcggactccgtacggagtccgag

SEQ ID NO: 3350 - DNA, 23 bp, Artificial sequence
  Primer
cctgactccgtacggagtcaggg

SEQ ID NO: 3351 - DNA, 23 bp, Artificial sequence
  Primer
cacgactccgtacggagtcgtgg

SEQ ID NO: 3352 - DNA, 23 bp, Artificial sequence
  Primer
gccgactccgtacggagtcggct

SEQ ID NO: 3353 - DNA, 23 bp, Artificial sequence
  Primer
gccgactccgtacggagtcggca

SEQ ID NO: 3354 - DNA, 23 bp, Artificial sequence
  Primer
cgagactccgtacggagtctcgc

SEQ ID NO: 3355 - DNA, 23 bp, Artificial sequence
  Primer
cgtgactccgtacggagtcacgc

SEQ ID NO: 3356 - DNA, 23 bp, Artificial sequence
  Primer
caggactccgtacggagtcctgc

SEQ ID NO: 3357 - DNA, 23 bp, Artificial sequence
  Primer
ctggactccgtacggagtccagc

SEQ ID NO: 3358 - DNA, 23 bp, Artificial sequence
  Primer
gaggactccgtacggagtcctcg

SEQ ID NO: 3359 - DNA, 23 bp, Artificial sequence
  Primer
gtggactccgtacggagtccacg

SEQ ID NO: 3360 - DNA, 23 bp, Artificial sequence
  Primer
accgactccgtacggagtcggtg

SEQ ID NO: 3361 - DNA, 23 bp, Artificial sequence
  Primer
tccgactccgtacggagtcggag

SEQ ID NO: 3362 - DNA, 23 bp, Artificial sequence
  Primer
cgggactccgtacggagtcccgc

SEQ ID NO: 3363 - DNA, 23 bp, Artificial sequence
  Primer
agggactccgtacggagtccctc

SEQ ID NO: 3364 - DNA, 23 bp, Artificial sequence
  Primer
tgggactccgtacggagtcccac

SEQ ID NO: 3365 - DNA, 23 bp, Artificial sequence
  Primer
  misc_feature (1)..(3): n is a, c, g, or t
  misc_feature (20)..(23): n is a, c, g, or t
nnngactccggccggagtcnnnn

SEQ ID NO: 3366 - DNA, 23 bp, Artificial sequence
  Primer
gcggactccggccggagtccgcc

SEQ ID NO: 3367 - DNA, 23 bp, Artificial sequence
  Primer
gcggactccggccggagtccgct

SEQ ID NO: 3368 - DNA, 23 bp, Artificial sequence
  Primer
acggactccggccggagtccgtc

SEQ ID NO: 3369 - DNA, 23 bp, Artificial sequence
  Primer
gaggactccggccggagtcctcc

SEQ ID NO: 3370 - DNA, 23 bp, Artificial sequence
  Primer
gcagactccggccggagtctgcc

SEQ ID NO: 3371 - DNA, 23 bp, Artificial sequence
  Primer
gcggactccggccggagtccgca

SEQ ID NO: 3372 - DNA, 23 bp, Artificial sequence
  Primer
tcggactccggccggagtccgac

SEQ ID NO: 3373 - DNA, 23 bp, Artificial sequence
  Primer
gtggactccggccggagtccacc

SEQ ID NO: 3374 - DNA, 23 bp, Artificial sequence
  Primer
gctgactccggccggagtcagcc

SEQ ID NO: 3375 - DNA, 23 bp, Artificial sequence
  Primer
cccgactccggccggagtcgggc

SEQ ID NO: 3376 - DNA, 23 bp, Artificial sequence
  Primer
cccgactccggccggagtcgggt

SEQ ID NO: 3377 - DNA, 23 bp, Artificial sequence
  Primer
accgactccggccggagtcggtc

SEQ ID NO: 3378 - DNA, 23 bp, Artificial sequence
  Primer
cacgactccggccggagtcgtgc

SEQ ID NO: 3379 - DNA, 23 bp, Artificial sequence
  Primer
ccagactccggccggagtctggc

SEQ ID NO: 3380 - DNA, 23 bp, Artificial sequence
  Primer
cccgactccggccggagtcggga

SEQ ID NO: 3381 - DNA, 23 bp, Artificial sequence
  Primer
tccgactccggccggagtcggac

SEQ ID NO: 3382 - DNA, 23 bp, Artificial sequence
  Primer
cctgactccggccggagtcaggc

SEQ ID NO: 3383 - DNA, 23 bp, Artificial sequence
  Primer
ggcgactccggccggagtcgccc

SEQ ID NO: 3384 - DNA, 23 bp, Artificial sequence
  Primer
ggcgactccggccggagtcgcct

SEQ ID NO: 3385 - DNA, 23 bp, Artificial sequence
  Primer
agcgactccggccggagtcgctc

SEQ ID NO: 3386 - DNA, 23 bp, Artificial sequence
  Primer
gacgactccggccggagtcgtcc

SEQ ID NO: 3387 - DNA, 23 bp, Artificial sequence
  Primer
ggagactccggccggagtctccc

SEQ ID NO: 3388 - DNA, 23 bp, Artificial sequence
  Primer
ggcgactccggccggagtcgcca

SEQ ID NO: 3389 - DNA, 23 bp, Artificial sequence
  Primer
tgcgactccggccggagtcgcac

SEQ ID NO: 3390 - DNA, 23 bp, Artificial sequence
  Primer
ggtgactccggccggagtcaccc

SEQ ID NO: 3391 - DNA, 23 bp, Artificial sequence
  Primer
cgggactccggccggagtcccgt

SEQ ID NO: 3392 - DNA, 23 bp, Artificial sequence
  Primer
agggactccggccggagtccctg

SEQ ID NO: 3393 - DNA, 23 bp, Artificial sequence
  Primer
caggactccggccggagtcctgg

SEQ ID NO: 3394 - DNA, 23 bp, Artificial sequence
  Primer
cgagactccggccggagtctcgg

SEQ ID NO: 3395 - DNA, 23 bp, Artificial sequence
  Primer
cgggactccggccggagtcccga

SEQ ID NO: 3396 - DNA, 23 bp, Artificial sequence
  Primer
tgggactccggccggagtcccag

SEQ ID NO: 3397 - DNA, 23 bp, Artificial sequence
  Primer
ctggactccggccggagtccagg

SEQ ID NO: 3398 - DNA, 23 bp, Artificial sequence
  Primer
cgtgactccggccggagtcacgg

SEQ ID NO: 3399 - DNA, 23 bp, Artificial sequence
  Primer
ggcgactccggccggagtcgccg

SEQ ID NO: 3400 - DNA, 23 bp, Artificial sequence
  Primer
agcgactccggccggagtcgctg

SEQ ID NO: 3401 - DNA, 23 bp, Artificial sequence
  Primer
gacgactccggccggagtcgtcg

SEQ ID NO: 3402 - DNA, 23 bp, Artificial sequence
  Primer
ggagactccggccggagtctccg

SEQ ID NO: 3403 - DNA, 23 bp, Artificial sequence
  Primer
tgcgactccggccggagtcgcag

SEQ ID NO: 3404 - DNA, 23 bp, Artificial sequence
  Primer
ggtgactccggccggagtcaccg

SEQ ID NO: 3405 - DNA, 23 bp, Artificial sequence
  Primer
acggactccggccggagtccgtg

SEQ ID NO: 3406 - DNA, 23 bp, Artificial sequence
  Primer
ccagactccggccggagtctggg

SEQ ID NO: 3407 - DNA, 23 bp, Artificial sequence
  Primer
tcggactccggccggagtccgag

SEQ ID NO: 3408 - DNA, 23 bp, Artificial sequence
  Primer
cctgactccggccggagtcaggg

SEQ ID NO: 3409 - DNA, 23 bp, Artificial sequence
  Primer
cacgactccggccggagtcgtgg

SEQ ID NO: 3410 - DNA, 23 bp, Artificial sequence
  Primer
gccgactccggccggagtcggct

SEQ ID NO: 3411 - DNA, 23 bp, Artificial sequence
  Primer
gccgactccggccggagtcggca

SEQ ID NO: 3412 - DNA, 23 bp, Artificial sequence
  Primer
cgagactccggccggagtctcgc

SEQ ID NO: 3413 - DNA, 23 bp, Artificial sequence
  Primer
cgtgactccggccggagtcacgc

SEQ ID NO: 3414 - DNA, 23 bp, Artificial sequence
  Primer
caggactccggccggagtcctgc

SEQ ID NO: 3415 - DNA, 23 bp, Artificial sequence
  Primer
ctggactccggccggagtccagc

SEQ ID NO: 3416 - DNA, 23 bp, Artificial sequence
  Primer
gaggactccggccggagtcctcg

SEQ ID NO: 3417 - DNA, 23 bp, Artificial sequence
  Primer
gtggactccggccggagtccacg

SEQ ID NO: 3418 - DNA, 23 bp, Artificial sequence
  Primer
accgactccggccggagtcggtg

SEQ ID NO: 3419 - DNA, 23 bp, Artificial sequence
  Primer
tccgactccggccggagtcggag

SEQ ID NO: 3420 - DNA, 23 bp, Artificial sequence
  Primer
cgggactccggccggagtcccgc

SEQ ID NO: 3421 - DNA, 23 bp, Artificial sequence
  Primer
agggactccggccggagtccctc

SEQ ID NO: 3422 - DNA, 23 bp, Artificial sequence
  Primer
tgggactccggccggagtcccac

SEQ ID NO: 3423 - DNA, 23 bp, Artificial sequence
  Primer
  misc_feature (1)..(3): n is a, c, g, or t
  misc_feature (20)..(23): n is a, c, g, or t
nnngactccgcgcggagtcnnnn

SEQ ID NO: 3424 - DNA, 23 bp, Artificial sequence
  Primer
gcggactccgcgcggagtccgcc

SEQ ID NO: 3425 - DNA, 23 bp, Artificial sequence
  Primer
gcggactccgcgcggagtccgct

SEQ ID NO: 3426 - DNA, 23 bp, Artificial sequence
  Primer
acggactccgcgcggagtccgtc

SEQ ID NO: 3427 - DNA, 23 bp, Artificial sequence
  Primer
gaggactccgcgcggagtcctcc

SEQ ID NO: 3428 - DNA, 23 bp, Artificial sequence
  Primer
gcagactccgcgcggagtctgcc

SEQ ID NO: 3429 - DNA, 23 bp, Artificial sequence
  Primer
gcggactccgcgcggagtccgca

SEQ ID NO: 3430 - DNA, 23 bp, Artificial sequence
  Primer
tcggactccgcgcggagtccgac

SEQ ID NO: 3431 - DNA, 23 bp, Artificial sequence
  Primer
gtggactccgcgcggagtccacc

SEQ ID NO: 3432 - DNA, 23 bp, Artificial sequence
  Primer
gctgactccgcgcggagtcagcc

SEQ ID NO: 3433 - DNA, 23 bp, Artificial sequence
  Primer
cccgactccgcgcggagtcgggc

SEQ ID NO: 3434 - DNA, 23 bp, Artificial sequence
  Primer
cccgactccgcgcggagtcgggt

SEQ ID NO: 3435 - DNA, 23 bp, Artificial sequence
  Primer
accgactccgcgcggagtcggtc

SEQ ID NO: 3436 - DNA, 23 bp, Artificial sequence
  Primer
cacgactccgcgcggagtcgtgc

SEQ ID NO: 3437 - DNA, 23 bp, Artificial sequence
  Primer
ccagactccgcgcggagtctggc

SEQ ID NO: 3438 - DNA, 23 bp, Artificial sequence
  Primer
cccgactccgcgcggagtcggga

SEQ ID NO: 3439 - DNA, 23 bp, Artificial sequence
  Primer
tccgactccgcgcggagtcggac

SEQ ID NO: 3440 - DNA, 23 bp, Artificial sequence
  Primer
cctgactccgcgcggagtcaggc

SEQ ID NO: 3441 - DNA, 23 bp, Artificial sequence
  Primer
ggcgactccgcgcggagtcgccc

SEQ ID NO: 3442 - DNA, 23 bp, Artificial sequence
  Primer
ggcgactccgcgcggagtcgcct

SEQ ID NO: 3443 - DNA, 23 bp, Artificial sequence
  Primer
agcgactccgcgcggagtcgctc

SEQ ID NO: 3444 - DNA, 23 bp, Artificial sequence
  Primer
gacgactccgcgcggagtcgtcc

SEQ ID NO: 3445 - DNA, 23 bp, Artificial sequence
  Primer
ggagactccgcgcggagtctccc

SEQ ID NO: 3446 - DNA, 23 bp, Artificial sequence
  Primer
ggcgactccgcgcggagtcgcca

SEQ ID NO: 3447 - DNA, 23 bp, Artificial sequence
  Primer
tgcgactccgcgcggagtcgcac

SEQ ID NO: 3448 - DNA, 23 bp, Artificial sequence
  Primer
ggtgactccgcgcggagtcaccc

SEQ ID NO: 3449 - DNA, 23 bp, Artificial sequence
  Primer
cgggactccgcgcggagtcccgt

SEQ ID NO: 3450 - DNA, 23 bp, Artificial sequence
  Primer
agggactccgcgcggagtccctg

SEQ ID NO: 3451 - DNA, 23 bp, Artificial sequence
  Primer
caggactccgcgcggagtcctgg

SEQ ID NO: 3452 - DNA, 23 bp, Artificial sequence
  Primer
cgagactccgcgcggagtctcgg

SEQ ID NO: 3453 - DNA, 23 bp, Artificial sequence
  Primer
cgggactccgcgcggagtcccga

SEQ ID NO: 3454 - DNA, 23 bp, Artificial sequence
  Primer
tgggactccgcgcggagtcccag

SEQ ID NO: 3455 - DNA, 23 bp, Artificial sequence
  Primer
ctggactccgcgcggagtccagg

SEQ ID NO: 3456 - DNA, 23 bp, Artificial sequence
  Primer
cgtgactccgcgcggagtcacgg

SEQ ID NO: 3457 - DNA, 23 bp, Artificial sequence
  Primer
ggcgactccgcgcggagtcgccg

SEQ ID NO: 3458 - DNA, 23 bp, Artificial sequence
  Primer
agcgactccgcgcggagtcgctg

SEQ ID NO: 3459 - DNA, 23 bp, Artificial sequence
  Primer
gacgactccgcgcggagtcgtcg

SEQ ID NO: 3460 - DNA, 23 bp, Artificial sequence
  Primer
ggagactccgcgcggagtctccg

SEQ ID NO: 3461 - DNA, 23 bp, Artificial sequence
  Primer
tgcgactccgcgcggagtcgcag

SEQ ID NO: 3462 - DNA, 23 bp, Artificial sequence
  Primer
ggtgactccgcgcggagtcaccg

SEQ ID NO: 3463 - DNA, 23 bp, Artificial sequence
  Primer
acggactccgcgcggagtccgtg

SEQ ID NO: 3464 - DNA, 23 bp, Artificial sequence
  Primer
ccagactccgcgcggagtctggg

SEQ ID NO: 3465 - DNA, 23 bp, Artificial sequence
  Primer
tcggactccgcgcggagtccgag

SEQ ID NO: 3466 - DNA, 23 bp, Artificial sequence
  Primer
cctgactccgcgcggagtcaggg

SEQ ID NO: 3467 - DNA, 23 bp, Artificial sequence
  Primer
cacgactccgcgcggagtcgtgg

SEQ ID NO: 3468 - DNA, 23 bp, Artificial sequence
  Primer
gccgactccgcgcggagtcggct

SEQ ID NO: 3469 - DNA, 23 bp, Artificial sequence
  Primer
gccgactccgcgcggagtcggca

SEQ ID NO: 3470 - DNA, 23 bp, Artificial sequence
  Primer
cgagactccgcgcggagtctcgc

SEQ ID NO: 3471 - DNA, 23 bp, Artificial sequence
  Primer
cgtgactccgcgcggagtcacgc

SEQ ID NO: 3472 - DNA, 23 bp, Artificial sequence
  Primer
caggactccgcgcggagtcctgc

SEQ ID NO: 3473 - DNA, 23 bp, Artificial sequence
  Primer
ctggactccgcgcggagtccagc

SEQ ID NO: 3474 - DNA, 23 bp, Artificial sequence
  Primer
gaggactccgcgcggagtcctcg

SEQ ID NO: 3475 - DNA, 23 bp, Artificial sequence
  Primer
gtggactccgcgcggagtccacg

SEQ ID NO: 3476 - DNA, 23 bp, Artificial sequence
  Primer
accgactccgcgcggagtcggtg

SEQ ID NO: 3477 - DNA, 23 bp, Artificial sequence
  Primer
tccgactccgcgcggagtcggag

SEQ ID NO: 3478 - DNA, 23 bp, Artificial sequence
  Primer
cgggactccgcgcggagtcccgc

SEQ ID NO: 3479 - DNA, 23 bp, Artificial sequence
  Primer
agggactccgcgcggagtccctc

SEQ ID NO: 3480 - DNA, 23 bp, Artificial sequence
  Primer
tgggactccgcgcggagtcccac

SEQ ID NO: 3481 - DNA, 23 bp, Artificial sequence
  Primer
  misc_feature (1)..(3): n is a, c, g, or t
  misc_feature (20)..(23): n is a, c, g, or t
nnngactctgatcagagtcnnnn

SEQ ID NO: 3482 - DNA, 23 bp, Artificial sequence
  Primer
gcggactctgatcagagtccgcc

SEQ ID NO: 3483 - DNA, 23 bp, Artificial sequence
  Primer
gcggactctgatcagagtccgct

SEQ ID NO: 3484 - DNA, 23 bp, Artificial sequence
  Primer
acggactctgatcagagtccgtc

SEQ ID NO: 3485 - DNA, 23 bp, Artificial sequence
  Primer
gaggactctgatcagagtcctcc

SEQ ID NO: 3486 - DNA, 23 bp, Artificial sequence
  Primer
gcagactctgatcagagtctgcc

SEQ ID NO: 3487 - DNA, 23 bp, Artificial sequence
  Primer
gcggactctgatcagagtccgca

SEQ ID NO: 3488 - DNA, 23 bp, Artificial sequence
  Primer
tcggactctgatcagagtccgac

SEQ ID NO: 3489 - DNA, 23 bp, Artificial sequence
  Primer
gtggactctgatcagagtccacc

SEQ ID NO: 3490 - DNA, 23 bp, Artificial sequence
  Primer
gctgactctgatcagagtcagcc

SEQ ID NO: 3491 - DNA, 23 bp, Artificial sequence
  Primer
cccgactctgatcagagtcgggc

SEQ ID NO: 3492 - DNA, 23 bp, Artificial sequence
  Primer
cccgactctgatcagagtcgggt

SEQ ID NO: 3493 - DNA, 23 bp, Artificial sequence
  Primer
accgactctgatcagagtcggtc

SEQ ID NO: 3494 - DNA, 23 bp, Artificial sequence
  Primer
cacgactctgatcagagtcgtgc

SEQ ID NO: 3495 - DNA, 23 bp, Artificial sequence
  Primer
ccagactctgatcagagtctggc

SEQ ID NO: 3496 - DNA, 23 bp, Artificial sequence
  Primer
cccgactctgatcagagtcggga

SEQ ID NO: 3497 - DNA, 23 bp, Artificial sequence
  Primer
tccgactctgatcagagtcggac

SEQ ID NO: 3498 - DNA, 23 bp, Artificial sequence
  Primer
cctgactctgatcagagtcaggc

SEQ ID NO: 3499 - DNA, 23 bp, Artificial sequence
  Primer
ggcgactctgatcagagtcgccc

SEQ ID NO: 3500 - DNA, 23 bp, Artificial sequence
  Primer
ggcgactctgatcagagtcgcct

SEQ ID NO: 3501 - DNA, 23 bp, Artificial sequence
  Primer
agcgactctgatcagagtcgctc

SEQ ID NO: 3502 - DNA, 23 bp, Artificial sequence
  Primer
gacgactctgatcagagtcgtcc

SEQ ID NO: 3503 - DNA, 23 bp, Artificial sequence
  Primer
ggagactctgatcagagtctccc

SEQ ID NO: 3504 - DNA, 23 bp, Artificial sequence
  Primer
ggcgactctgatcagagtcgcca

SEQ ID NO: 3505 - DNA, 23 bp, Artificial sequence
  Primer
tgcgactctgatcagagtcgcac

SEQ ID NO: 3506 - DNA, 23 bp, Artificial sequence
  Primer
ggtgactctgatcagagtcaccc

SEQ ID NO: 3507 - DNA, 23 bp, Artificial sequence
  Primer
cgggactctgatcagagtcccgt

SEQ ID NO: 3508 - DNA, 23 bp, Artificial sequence
  Primer
agggactctgatcagagtccctg

SEQ ID NO: 3509 - DNA, 23 bp, Artificial sequence
  Primer
caggactctgatcagagtcctgg

SEQ ID NO: 3510 - DNA, 23 bp, Artificial sequence
  Primer
cgagactctgatcagagtctcgg

SEQ ID NO: 3511 - DNA, 23 bp, Artificial sequence
  Primer
cgggactctgatcagagtcccga

SEQ ID NO: 3512 - DNA, 23 bp, Artificial sequence
  Primer
tgggactctgatcagagtcccag

SEQ ID NO: 3513 - DNA, 23 bp, Artificial sequence
  Primer
ctggactctgatcagagtccagg

SEQ ID NO: 3514 - DNA, 23 bp, Artificial sequence
  Primer
cgtgactctgatcagagtcacgg

SEQ ID NO: 3515 - DNA, 23 bp, Artificial sequence
  Primer
ggcgactctgatcagagtcgccg

SEQ ID NO: 3516 - DNA, 23 bp, Artificial sequence
  Primer
agcgactctgatcagagtcgctg

SEQ ID NO: 3517 - DNA, 23 bp, Artificial sequence
  Primer
gacgactctgatcagagtcgtcg

SEQ ID NO: 3518 - DNA, 23 bp, Artificial sequence
  Primer
ggagactctgatcagagtctccg

SEQ ID NO: 3519 - DNA, 23 bp, Artificial sequence
  Primer
tgcgactctgatcagagtcgcag

SEQ ID NO: 3520 - DNA, 23 bp, Artificial sequence
  Primer
ggtgactctgatcagagtcaccg

SEQ ID NO: 3521 - DNA, 23 bp, Artificial sequence
  Primer
acggactctgatcagagtccgtg

SEQ ID NO: 3522 - DNA, 23 bp, Artificial sequence
  Primer
ccagactctgatcagagtctggg

SEQ ID NO: 3523 - DNA, 23 bp, Artificial sequence
  Primer
tcggactctgatcagagtccgag

SEQ ID NO: 3524 - DNA, 23 bp, Artificial sequence
  Primer
cctgactctgatcagagtcaggg

SEQ ID NO: 3525 - DNA, 23 bp, Artificial sequence
  Primer
cacgactctgatcagagtcgtgg

SEQ ID NO: 3526 - DNA, 23 bp, Artificial sequence
  Primer
gccgactctgatcagagtcggct

SEQ ID NO: 3527 - DNA, 23 bp, Artificial sequence
  Primer
gccgactctgatcagagtcggca

SEQ ID NO: 3528 - DNA, 23 bp, Artificial sequence
  Primer
cgagactctgatcagagtctcgc

SEQ ID NO: 3529 - DNA, 23 bp, Artificial sequence
  Primer
cgtgactctgatcagagtcacgc

SEQ ID NO: 3530 - DNA, 23 bp, Artificial sequence
  Primer
caggactctgatcagagtcctgc

SEQ ID NO: 3531 - DNA, 23 bp, Artificial sequence
  Primer
ctggactctgatcagagtccagc

SEQ ID NO: 3532 - DNA, 23 bp, Artificial sequence
  Primer
gaggactctgatcagagtcctcg

SEQ ID NO: 3533 - DNA, 23 bp, Artificial sequence
  Primer
gtggactctgatcagagtccacg

SEQ ID NO: 3534 - DNA, 23 bp, Artificial sequence
  Primer
accgactctgatcagagtcggtg

SEQ ID NO: 3535 - DNA, 23 bp, Artificial sequence
  Primer
tccgactctgatcagagtcggag

SEQ ID NO: 3536 - DNA, 23 bp, Artificial sequence
  Primer
cgggactctgatcagagtcccgc

SEQ ID NO: 3537 - DNA, 23 bp, Artificial sequence
  Primer
agggactctgatcagagtccctc

SEQ ID NO: 3538 - DNA, 23 bp, Artificial sequence
  Primer
tgggactctgatcagagtcccac

SEQ ID NO: 3539 - DNA, 23 bp, Artificial sequence
  Primer
  misc_feature (1)..(3): n is a, c, g, or t
  misc_feature (20)..(23): n is a, c, g, or t
nnngactctgtacagagtcnnnn

SEQ ID NO: 3540 - DNA, 23 bp, Artificial sequence
  Primer
gcggactctgtacagagtccgcc

SEQ ID NO: 3541 - DNA, 23 bp, Artificial sequence
  Primer
gcggactctgtacagagtccgct

SEQ ID NO: 3542 - DNA, 23 bp, Artificial sequence
  Primer
acggactctgtacagagtccgtc

SEQ ID NO: 3543 - DNA, 23 bp, Artificial sequence
  Primer
gaggactctgtacagagtcctcc

SEQ ID NO: 3544 - DNA, 23 bp, Artificial sequence
  Primer
gcagactctgtacagagtctgcc

SEQ ID NO: 3545 - DNA, 23 bp, Artificial sequence
  Primer
gcggactctgtacagagtccgca

SEQ ID NO: 3546 - DNA, 23 bp, Artificial sequence
  Primer
tcggactctgtacagagtccgac

SEQ ID NO: 3547 - DNA, 23 bp, Artificial sequence
  Primer
gtggactctgtacagagtccacc

SEQ ID NO: 3548 - DNA, 23 bp, Artificial sequence
  Primer
gctgactctgtacagagtcagcc

SEQ ID NO: 3549 - DNA, 23 bp, Artificial sequence
  Primer
cccgactctgtacagagtcgggc

SEQ ID NO: 3550 - DNA, 23 bp, Artificial sequence
  Primer
cccgactctgtacagagtcgggt

SEQ ID NO: 3551 - DNA, 23 bp, Artificial sequence
  Primer
accgactctgtacagagtcggtc

SEQ ID NO: 3552 - DNA, 23 bp, Artificial sequence
  Primer
cacgactctgtacagagtcgtgc

SEQ ID NO: 3553 - DNA, 23 bp, Artificial sequence
  Primer
ccagactctgtacagagtctggc

SEQ ID NO: 3554 - DNA, 23 bp, Artificial sequence
  Primer
cccgactctgtacagagtcggga

SEQ ID NO: 3555 - DNA, 23 bp, Artificial sequence
  Primer
tccgactctgtacagagtcggac

SEQ ID NO: 3556 - DNA, 23 bp, Artificial sequence
  Primer
cctgactctgtacagagtcaggc

SEQ ID NO: 3557 - DNA, 23 bp, Artificial sequence
  Primer
ggcgactctgtacagagtcgccc

SEQ ID NO: 3558 - DNA, 23 bp, Artificial sequence
  Primer
ggcgactctgtacagagtcgcct

SEQ ID NO: 3559 - DNA, 23 bp, Artificial sequence
  Primer
agcgactctgtacagagtcgctc

SEQ ID NO: 3560 - DNA, 23 bp, Artificial sequence
  Primer
gacgactctgtacagagtcgtcc

SEQ ID NO: 3561 - DNA, 23 bp, Artificial sequence
  Primer
ggagactctgtacagagtctccc

SEQ ID NO: 3562 - DNA, 23 bp, Artificial sequence
  Primer
ggcgactctgtacagagtcgcca

SEQ ID NO: 3563 - DNA, 23 bp, Artificial sequence
  Primer
tgcgactctgtacagagtcgcac

SEQ ID NO: 3564 - DNA, 23 bp, Artificial sequence
  Primer
ggtgactctgtacagagtcaccc

SEQ ID NO: 3565 - DNA, 23 bp, Artificial sequence
  Primer
cgggactctgtacagagtcccgt

SEQ ID NO: 3566 - DNA, 23 bp, Artificial sequence
  Primer
agggactctgtacagagtccctg

SEQ ID NO: 3567 - DNA, 23 bp, Artificial sequence
  Primer
caggactctgtacagagtcctgg

SEQ ID NO: 3568 - DNA, 23 bp, Artificial sequence
  Primer
cgagactctgtacagagtctcgg

SEQ ID NO: 3569 - DNA, 23 bp, Artificial sequence
  Primer
cgggactctgtacagagtcccga

SEQ ID NO: 3570 - DNA, 23 bp, Artificial sequence
  Primer
tgggactctgtacagagtcccag

SEQ ID NO: 3571 - DNA, 23 bp, Artificial sequence
  Primer
ctggactctgtacagagtccagg

SEQ ID NO: 3572 - DNA, 23 bp, Artificial sequence
  Primer
cgtgactctgtacagagtcacgg

SEQ ID NO: 3573 - DNA, 23 bp, Artificial sequence
  Primer
ggcgactctgtacagagtcgccg

SEQ ID NO: 3574 - DNA, 23 bp, Artificial sequence
  Primer
agcgactctgtacagagtcgctg

SEQ ID NO: 3575 - DNA, 23 bp, Artificial sequence
  Primer
gacgactctgtacagagtcgtcg

SEQ ID NO: 3576 - DNA, 23 bp, Artificial sequence
  Primer
ggagactctgtacagagtctccg

SEQ ID NO: 3577 - DNA, 23 bp, Artificial sequence
  Primer
tgcgactctgtacagagtcgcag

SEQ ID NO: 3578 - DNA, 23 bp, Artificial sequence
  Primer
ggtgactctgtacagagtcaccg

SEQ ID NO: 3579 - DNA, 23 bp, Artificial sequence
  Primer
acggactctgtacagagtccgtg

SEQ ID NO: 3580 - DNA, 23 bp, Artificial sequence
  Primer
ccagactctgtacagagtctggg

SEQ ID NO: 3581 - DNA, 23 bp, Artificial sequence
  Primer
tcggactctgtacagagtccgag

SEQ ID NO: 3582 - DNA, 23 bp, Artificial sequence
  Primer
cctgactctgtacagagtcaggg

SEQ ID NO: 3583 - DNA, 23 bp, Artificial sequence
  Primer
cacgactctgtacagagtcgtgg

SEQ ID NO: 3584 - DNA, 23 bp, Artificial sequence
  Primer
gccgactctgtacagagtcggct

SEQ ID NO: 3585 - DNA, 23 bp, Artificial sequence
  Primer
gccgactctgtacagagtcggca

SEQ ID NO: 3586 - DNA, 23 bp, Artificial sequence
  Primer
cgagactctgtacagagtctcgc

SEQ ID NO: 3587 - DNA, 23 bp, Artificial sequence
  Primer
cgtgactctgtacagagtcacgc

SEQ ID NO: 3588 - DNA, 23 bp, Artificial sequence
  Primer
caggactctgtacagagtcctgc

SEQ ID NO: 3589 - DNA, 23 bp, Artificial sequence
  Primer
ctggactctgtacagagtccagc

SEQ ID NO: 3590 - DNA, 23 bp, Artificial sequence
  Primer
gaggactctgtacagagtcctcg

SEQ ID NO: 3591 - DNA, 23 bp, Artificial sequence
  Primer
gtggactctgtacagagtccacg

SEQ ID NO: 3592 - DNA, 23 bp, Artificial sequence
  Primer
accgactctgtacagagtcggtg

SEQ ID NO: 3593 - DNA, 23 bp, Artificial sequence
  Primer
tccgactctgtacagagtcggag

SEQ ID NO: 3594 - DNA, 23 bp, Artificial sequence
  Primer
cgggactctgtacagagtcccgc

SEQ ID NO: 3595 - DNA, 23 bp, Artificial sequence
  Primer
agggactctgtacagagtccctc

SEQ ID NO: 3596 - DNA, 23 bp, Artificial sequence
  Primer
tgggactctgtacagagtcccac

SEQ ID NO: 3597 - DNA, 23 bp, Artificial sequence
  Primer
  misc_feature (1)..(3): n is a, c, g, or t
  misc_feature (20)..(23): n is a, c, g, or t
nnngactctggccagagtcnnnn

SEQ ID NO: 3598 - DNA, 23 bp, Artificial sequence
  Primer
gcggactctggccagagtccgcc

SEQ ID NO: 3599 - DNA, 23 bp, Artificial sequence
  Primer
gcggactctggccagagtccgct

SEQ ID NO: 3600 - DNA, 23 bp, Artificial sequence
  Primer
acggactctggccagagtccgtc

SEQ ID NO: 3601 - DNA, 23 bp, Artificial sequence
  Primer
gaggactctggccagagtcctcc

SEQ ID NO: 3602 - DNA, 23 bp, Artificial sequence
  Primer
gcagactctggccagagtctgcc

SEQ ID NO: 3603 - DNA, 23 bp, Artificial sequence
  Primer
gcggactctggccagagtccgca

SEQ ID NO: 3604 - DNA, 23 bp, Artificial sequence
  Primer
tcggactctggccagagtccgac

SEQ ID NO: 3605 - DNA, 23 bp, Artificial sequence
  Primer
gtggactctggccagagtccacc

SEQ ID NO: 3606 - DNA, 23 bp, Artificial sequence
  Primer
gctgactctggccagagtcagcc

SEQ ID NO: 3607 - DNA, 23 bp, Artificial sequence
  Primer
cccgactctggccagagtcgggc

SEQ ID NO: 3608 - DNA, 23 bp, Artificial sequence
  Primer
cccgactctggccagagtcgggt

SEQ ID NO: 3609 - DNA, 23 bp, Artificial sequence
  Primer
accgactctggccagagtcggtc

SEQ ID NO: 3610 - DNA, 23 bp, Artificial sequence
  Primer
cacgactctggccagagtcgtgc

SEQ ID NO: 3611 - DNA, 23 bp, Artificial sequence
  Primer
ccagactctggccagagtctggc

SEQ ID NO: 3612 - DNA, 23 bp, Artificial sequence
  Primer
cccgactctggccagagtcggga

SEQ ID NO: 3613 - DNA, 23 bp, Artificial sequence
  Primer
tccgactctggccagagtcggac

SEQ ID NO: 3614 - DNA, 23 bp, Artificial sequence
  Primer
cctgactctggccagagtcaggc

SEQ ID NO: 3615 - DNA, 23 bp, Artificial sequence
  Primer
ggcgactctggccagagtcgccc

SEQ ID NO: 3616 - DNA, 23 bp, Artificial sequence
  Primer
ggcgactctggccagagtcgcct

SEQ ID NO: 3617 - DNA, 23 bp, Artificial sequence
  Primer
agcgactctggccagagtcgctc

SEQ ID NO: 3618 - DNA, 23 bp, Artificial sequence
  Primer
gacgactctggccagagtcgtcc

SEQ ID NO: 3619 - DNA, 23 bp, Artificial sequence
  Primer
ggagactctggccagagtctccc

SEQ ID NO: 3620 - DNA, 23 bp, Artificial sequence
  Primer
ggcgactctggccagagtcgcca

SEQ ID NO: 3621 - DNA, 23 bp, Artificial sequence
  Primer
tgcgactctggccagagtcgcac

SEQ ID NO: 3622 - DNA, 23 bp, Artificial sequence
  Primer
ggtgactctggccagagtcaccc

SEQ ID NO: 3623 - DNA, 23 bp, Artificial sequence
  Primer
cgggactctggccagagtcccgt

SEQ ID NO: 3624 - DNA, 23 bp, Artificial sequence
  Primer
agggactctggccagagtccctg

SEQ ID NO: 3625 - DNA, 23 bp, Artificial sequence
  Primer
caggactctggccagagtcctgg

SEQ ID NO: 3626 - DNA, 23 bp, Artificial sequence
  Primer
cgagactctggccagagtctcgg

SEQ ID NO: 3627 - DNA, 23 bp, Artificial sequence
  Primer
cgggactctggccagagtcccga

SEQ ID NO: 3628 - DNA, 23 bp, Artificial sequence
  Primer
tgggactctggccagagtcccag

SEQ ID NO: 3629 - DNA, 23 bp, Artificial sequence
  Primer
ctggactctggccagagtccagg

SEQ ID NO: 3630 - DNA, 23 bp, Artificial sequence
  Primer
cgtgactctggccagagtcacgg

SEQ ID NO: 3631 - DNA, 23 bp, Artificial sequence
  Primer
ggcgactctggccagagtcgccg

SEQ ID NO: 3632 - DNA, 23 bp, Artificial sequence
  Primer
agcgactctggccagagtcgctg

SEQ ID NO: 3633 - DNA, 23 bp, Artificial sequence
  Primer
gacgactctggccagagtcgtcg

SEQ ID NO: 3634 - DNA, 23 bp, Artificial sequence
  Primer
ggagactctggccagagtctccg

SEQ ID NO: 3635 - DNA, 23 bp, Artificial sequence
  Primer
tgcgactctggccagagtcgcag

SEQ ID NO: 3636 - DNA, 23 bp, Artificial sequence
  Primer
ggtgactctggccagagtcaccg

SEQ ID NO: 3637 - DNA, 23 bp, Artificial sequence
  Primer
acggactctggccagagtccgtg

SEQ ID NO: 3638 - DNA, 23 bp, Artificial sequence
  Primer
ccagactctggccagagtctggg

SEQ ID NO: 3639 - DNA, 23 bp, Artificial sequence
  Primer
tcggactctggccagagtccgag

SEQ ID NO: 3640 - DNA, 23 bp, Artificial sequence
  Primer
cctgactctggccagagtcaggg

SEQ ID NO: 3641 - DNA, 23 bp, Artificial sequence
  Primer
cacgactctggccagagtcgtgg

SEQ ID NO: 3642 - DNA, 23 bp, Artificial sequence
  Primer
gccgactctggccagagtcggct

SEQ ID NO: 3643 - DNA, 23 bp, Artificial sequence
  Primer
gccgactctggccagagtcggca

SEQ ID NO: 3644 - DNA, 23 bp, Artificial sequence
  Primer
cgagactctggccagagtctcgc

SEQ ID NO: 3645 - DNA, 23 bp, Artificial sequence
  Primer
cgtgactctggccagagtcacgc

SEQ ID NO: 3646 - DNA, 23 bp, Artificial sequence
  Primer
caggactctggccagagtcctgc

SEQ ID NO: 3647 - DNA, 23 bp, Artificial sequence
  Primer
ctggactctggccagagtccagc

SEQ ID NO: 3648 - DNA, 23 bp, Artificial sequence
  Primer
gaggactctggccagagtcctcg

SEQ ID NO: 3649 - DNA, 23 bp, Artificial sequence
  Primer
gtggactctggccagagtccacg

SEQ ID NO: 3650 - DNA, 23 bp, Artificial sequence
  Primer
accgactctggccagagtcggtg

SEQ ID NO: 3651 - DNA, 23 bp, Artificial sequence
  Primer
tccgactctggccagagtcggag

SEQ ID NO: 3652 - DNA, 23 bp, Artificial sequence
  Primer
cgggactctggccagagtcccgc

SEQ ID NO: 3653 - DNA, 23 bp, Artificial sequence
  Primer
agggactctggccagagtccctc

SEQ ID NO: 3654 - DNA, 23 bp, Artificial sequence
  Primer
tgggactctggccagagtcccac

SEQ ID NO: 3655 - DNA, 23 bp, Artificial sequence
  Primer
  misc_feature (1)..(3): n is a, c, g, or t
  misc_feature (20)..(23): n is a, c, g, or t
nnngactctgcgcagagtcnnnn

SEQ ID NO: 3656 - DNA, 23 bp, Artificial sequence
  Primer
gcggactctgcgcagagtccgcc

SEQ ID NO: 3657 - DNA, 23 bp, Artificial sequence
  Primer
gcggactctgcgcagagtccgct

SEQ ID NO: 3658 - DNA, 23 bp, Artificial sequence
  Primer
acggactctgcgcagagtccgtc

SEQ ID NO: 3659 - DNA, 23 bp, Artificial sequence
  Primer
gaggactctgcgcagagtcctcc

SEQ ID NO: 3660 - DNA, 23 bp, Artificial sequence
  Primer
gcagactctgcgcagagtctgcc

SEQ ID NO: 3661 - DNA, 23 bp, Artificial sequence
  Primer
gcggactctgcgcagagtccgca

SEQ ID NO: 3662 - DNA, 23 bp, Artificial sequence
  Primer
tcggactctgcgcagagtccgac

SEQ ID NO: 3663 - DNA, 23 bp, Artificial sequence
  Primer
gtggactctgcgcagagtccacc

SEQ ID NO: 3664 - DNA, 23 bp, Artificial sequence
  Primer
gctgactctgcgcagagtcagcc

SEQ ID NO: 3665 - DNA, 23 bp, Artificial sequence
  Primer
cccgactctgcgcagagtcgggc

SEQ ID NO: 3666 - DNA, 23 bp, Artificial sequence
  Primer
cccgactctgcgcagagtcgggt

SEQ ID NO: 3667 - DNA, 23 bp, Artificial sequence
  Primer
accgactctgcgcagagtcggtc

SEQ ID NO: 3668 - DNA, 23 bp, Artificial sequence
  Primer
cacgactctgcgcagagtcgtgc

SEQ ID NO: 3669 - DNA, 23 bp, Artificial sequence
  Primer
ccagactctgcgcagagtctggc

SEQ ID NO: 3670 - DNA, 23 bp, Artificial sequence
  Primer
cccgactctgcgcagagtcggga

SEQ ID NO: 3671 - DNA, 23 bp, Artificial sequence
  Primer
tccgactctgcgcagagtcggac

SEQ ID NO: 3672 - DNA, 23 bp, Artificial sequence
  Primer
cctgactctgcgcagagtcaggc

SEQ ID NO: 3673 - DNA, 23 bp, Artificial sequence
  Primer
ggcgactctgcgcagagtcgccc

SEQ ID NO: 3674 - DNA, 23 bp, Artificial sequence
  Primer
ggcgactctgcgcagagtcgcct

SEQ ID NO: 3675 - DNA, 23 bp, Artificial sequence
  Primer
agcgactctgcgcagagtcgctc

SEQ ID NO: 3676 - DNA, 23 bp, Artificial sequence
  Primer
gacgactctgcgcagagtcgtcc

SEQ ID NO: 3677 - DNA, 23 bp, Artificial sequence
  Primer
ggagactctgcgcagagtctccc

SEQ ID NO: 3678 - DNA, 23 bp, Artificial sequence
  Primer
ggcgactctgcgcagagtcgcca

SEQ ID NO: 3679 - DNA, 23 bp, Artificial sequence
  Primer
tgcgactctgcgcagagtcgcac

SEQ ID NO: 3680 - DNA, 23 bp, Artificial sequence
  Primer
ggtgactctgcgcagagtcaccc

SEQ ID NO: 3681 - DNA, 23 bp, Artificial sequence
  Primer
cgggactctgcgcagagtcccgt

SEQ ID NO: 3682 - DNA, 23 bp, Artificial sequence
  Primer
agggactctgcgcagagtccctg

SEQ ID NO: 3683 - DNA, 23 bp, Artificial sequence
  Primer
caggactctgcgcagagtcctgg

SEQ ID NO: 3684 - DNA, 23 bp, Artificial sequence
  Primer
cgagactctgcgcagagtctcgg

SEQ ID NO: 3685 - DNA, 23 bp, Artificial sequence
  Primer
cgggactctgcgcagagtcccga

SEQ ID NO: 3686 - DNA, 23 bp, Artificial sequence
  Primer
tgggactctgcgcagagtcccag

SEQ ID NO: 3687 - DNA, 23 bp, Artificial sequence
  Primer
ctggactctgcgcagagtccagg

SEQ ID NO: 3688 - DNA, 23 bp, Artificial sequence
  Primer
cgtgactctgcgcagagtcacgg

SEQ ID NO: 3689 - DNA, 23 bp, Artificial sequence
  Primer
ggcgactctgcgcagagtcgccg

SEQ ID NO: 3690 - DNA, 23 bp, Artificial sequence
  Primer
agcgactctgcgcagagtcgctg

SEQ ID NO: 3691 - DNA, 23 bp, Artificial sequence
  Primer
gacgactctgcgcagagtcgtcg

SEQ ID NO: 3692 - DNA, 23 bp, Artificial sequence
  Primer
ggagactctgcgcagagtctccg

SEQ ID NO: 3693 - DNA, 23 bp, Artificial sequence
  Primer
tgcgactctgcgcagagtcgcag

SEQ ID NO: 3694 - DNA, 23 bp, Artificial sequence
  Primer
ggtgactctgcgcagagtcaccg

SEQ ID NO: 3695 - DNA, 23 bp, Artificial sequence
  Primer
acggactctgcgcagagtccgtg

SEQ ID NO: 3696 - DNA, 23 bp, Artificial sequence
  Primer
ccagactctgcgcagagtctggg

SEQ ID NO: 3697 - DNA, 23 bp, Artificial sequence
  Primer
tcggactctgcgcagagtccgag

SEQ ID NO: 3698 - DNA, 23 bp, Artificial sequence
  Primer
cctgactctgcgcagagtcaggg

SEQ ID NO: 3699 - DNA, 23 bp, Artificial sequence
  Primer
cacgactctgcgcagagtcgtgg

SEQ ID NO: 3700 - DNA, 23 bp, Artificial sequence
  Primer
gccgactctgcgcagagtcggct

SEQ ID NO: 3701 - DNA, 23 bp, Artificial sequence
  Primer
gccgactctgcgcagagtcggca

SEQ ID NO: 3702 - DNA, 23 bp, Artificial sequence
  Primer
cgagactctgcgcagagtctcgc

SEQ ID NO: 3703 - DNA, 23 bp, Artificial sequence
  Primer
cgtgactctgcgcagagtcacgc

SEQ ID NO: 3704 - DNA, 23 bp, Artificial sequence
  Primer
caggactctgcgcagagtcctgc

SEQ ID NO: 3705 - DNA, 23 bp, Artificial sequence
  Primer
ctggactctgcgcagagtccagc

SEQ ID NO: 3706 - DNA, 23 bp, Artificial sequence
  Primer
gaggactctgcgcagagtcctcg

SEQ ID NO: 3707 - DNA, 23 bp, Artificial sequence
  Primer
gtggactctgcgcagagtccacg

SEQ ID NO: 3708 - DNA, 23 bp, Artificial sequence
  Primer
accgactctgcgcagagtcggtg

SEQ ID NO: 3709 - DNA, 23 bp, Artificial sequence
  Primer
tccgactctgcgcagagtcggag

SEQ ID NO: 3710 - DNA, 23 bp, Artificial sequence
  Primer
cgggactctgcgcagagtcccgc

SEQ ID NO: 3711 - DNA, 23 bp, Artificial sequence
  Primer
agggactctgcgcagagtccctc

SEQ ID NO: 3712 - DNA, 23 bp, Artificial sequence
  Primer
tgggactctgcgcagagtcccac

SEQ ID NO: 3713 - DNA, 23 bp, Artificial sequence
  Primer
  misc_feature (1)..(3): n is a, c, g, or t
  misc_feature (20)..(23): n is a, c, g, or t
nnngactcgcatgcgagtcnnnn

SEQ ID NO: 3714 - DNA, 23 bp, Artificial sequence
  Primer
gcggactcgcatgcgagtccgcc

SEQ ID NO: 3715 - DNA, 23 bp, Artificial sequence
  Primer
gcggactcgcatgcgagtccgct

SEQ ID NO: 3716 - DNA, 23 bp, Artificial sequence
  Primer
acggactcgcatgcgagtccgtc

SEQ ID NO: 3717 - DNA, 23 bp, Artificial sequence
  Primer
gaggactcgcatgcgagtcctcc

SEQ ID NO: 3718 - DNA, 23 bp, Artificial sequence
  Primer
gcagactcgcatgcgagtctgcc

SEQ ID NO: 3719 - DNA, 23 bp, Artificial sequence
  Primer
gcggactcgcatgcgagtccgca

SEQ ID NO: 3720 - DNA, 23 bp, Artificial sequence
  Primer
tcggactcgcatgcgagtccgac

SEQ ID NO: 3721 - DNA, 23 bp, Artificial sequence
  Primer
gtggactcgcatgcgagtccacc

SEQ ID NO: 3722 - DNA, 23 bp, Artificial sequence
  Primer
gctgactcgcatgcgagtcagcc

SEQ ID NO: 3723 - DNA, 23 bp, Artificial sequence
  Primer
cccgactcgcatgcgagtcgggc

SEQ ID NO: 3724 - DNA, 23 bp, Artificial sequence
  Primer
cccgactcgcatgcgagtcgggt

SEQ ID NO: 3725 - DNA, 23 bp, Artificial sequence
  Primer
accgactcgcatgcgagtcggtc

SEQ ID NO: 3726 - DNA, 23 bp, Artificial sequence
  Primer
cacgactcgcatgcgagtcgtgc

SEQ ID NO: 3727 - DNA, 23 bp, Artificial sequence
  Primer
ccagactcgcatgcgagtctggc

SEQ ID NO: 3728 - DNA, 23 bp, Artificial sequence
  Primer
cccgactcgcatgcgagtcggga

SEQ ID NO: 3729 - DNA, 23 bp, Artificial sequence
  Primer
tccgactcgcatgcgagtcggac

SEQ ID NO: 3730 - DNA, 23 bp, Artificial sequence
  Primer
cctgactcgcatgcgagtcaggc

SEQ ID NO: 3731 - DNA, 23 bp, Artificial sequence
  Primer
ggcgactcgcatgcgagtcgccc

SEQ ID NO: 3732 - DNA, 23 bp, Artificial sequence
  Primer
ggcgactcgcatgcgagtcgcct

SEQ ID NO: 3733 - DNA, 23 bp, Artificial sequence
  Primer
agcgactcgcatgcgagtcgctc

SEQ ID NO: 3734 - DNA, 23 bp, Artificial sequence
  Primer
gacgactcgcatgcgagtcgtcc

SEQ ID NO: 3735 - DNA, 23 bp, Artificial sequence
  Primer
ggagactcgcatgcgagtctccc

SEQ ID NO: 3736 - DNA, 23 bp, Artificial sequence
  Primer
ggcgactcgcatgcgagtcgcca

SEQ ID NO: 3737 - DNA, 23 bp, Artificial sequence
  Primer
tgcgactcgcatgcgagtcgcac

SEQ ID NO: 3738 - DNA, 23 bp, Artificial sequence
  Primer
ggtgactcgcatgcgagtcaccc

SEQ ID NO: 3739 - DNA, 23 bp, Artificial sequence
  Primer
cgggactcgcatgcgagtcccgt

SEQ ID NO: 3740 - DNA, 23 bp, Artificial sequence
  Primer
agggactcgcatgcgagtccctg

SEQ ID NO: 3741 - DNA, 23 bp, Artificial sequence
  Primer
caggactcgcatgcgagtcctgg

SEQ ID NO: 3742 - DNA, 23 bp, Artificial sequence
  Primer
cgagactcgcatgcgagtctcgg

SEQ ID NO: 3743 - DNA, 23 bp, Artificial sequence
  Primer
cgggactcgcatgcgagtcccga

SEQ ID NO: 3744 - DNA, 23 bp, Artificial sequence
  Primer
tgggactcgcatgcgagtcccag

SEQ ID NO: 3745 - DNA, 23 bp, Artificial sequence
  Primer
ctggactcgcatgcgagtccagg

SEQ ID NO: 3746 - DNA, 23 bp, Artificial sequence
  Primer
cgtgactcgcatgcgagtcacgg

SEQ ID NO: 3747 - DNA, 23 bp, Artificial sequence
  Primer
ggcgactcgcatgcgagtcgccg

SEQ ID NO: 3748 - DNA, 23 bp, Artificial sequence
  Primer
agcgactcgcatgcgagtcgctg

SEQ ID NO: 3749 - DNA, 23 bp, Artificial sequence
  Primer
gacgactcgcatgcgagtcgtcg

SEQ ID NO: 3750 - DNA, 23 bp, Artificial sequence
  Primer
ggagactcgcatgcgagtctccg

SEQ ID NO: 3751 - DNA, 23 bp, Artificial sequence
  Primer
tgcgactcgcatgcgagtcgcag

SEQ ID NO: 3752 - DNA, 23 bp, Artificial sequence
  Primer
ggtgactcgcatgcgagtcaccg

SEQ ID NO: 3753 - DNA, 23 bp, Artificial sequence
  Primer
acggactcgcatgcgagtccgtg

SEQ ID NO: 3754 - DNA, 23 bp, Artificial sequence
  Primer
ccagactcgcatgcgagtctggg

SEQ ID NO: 3755 - DNA, 23 bp, Artificial sequence
  Primer
tcggactcgcatgcgagtccgag

SEQ ID NO: 3756 - DNA, 23 bp, Artificial sequence
  Primer
cctgactcgcatgcgagtcaggg

SEQ ID NO: 3757 - DNA, 23 bp, Artificial sequence
  Primer
cacgactcgcatgcgagtcgtgg

SEQ ID NO: 3758 - DNA, 23 bp, Artificial sequence
  Primer
gccgactcgcatgcgagtcggct

SEQ ID NO: 3759 - DNA, 23 bp, Artificial sequence
  Primer
gccgactcgcatgcgagtcggca

SEQ ID NO: 3760 - DNA, 23 bp, Artificial sequence
  Primer
cgagactcgcatgcgagtctcgc

SEQ ID NO: 3761 - DNA, 23 bp, Artificial sequence
  Primer
cgtgactcgcatgcgagtcacgc

SEQ ID NO: 3762 - DNA, 23 bp, Artificial sequence
  Primer
caggactcgcatgcgagtcctgc

SEQ ID NO: 3763 - DNA, 23 bp, Artificial sequence
  Primer
ctggactcgcatgcgagtccagc

SEQ ID NO: 3764 - DNA, 23 bp, Artificial sequence
  Primer
gaggactcgcatgcgagtcctcg

SEQ ID NO: 3765 - DNA, 23 bp, Artificial sequence
  Primer
gtggactcgcatgcgagtccacg

SEQ ID NO: 3766 - DNA, 23 bp, Artificial sequence
  Primer
accgactcgcatgcgagtcggtg

SEQ ID NO: 3767 - DNA, 23 bp, Artificial sequence
  Primer
tccgactcgcatgcgagtcggag

SEQ ID NO: 3768 - DNA, 23 bp, Artificial sequence
  Primer
cgggactcgcatgcgagtcccgc

SEQ ID NO: 3769 - DNA, 23 bp, Artificial sequence
  Primer
agggactcgcatgcgagtccctc

SEQ ID NO: 3770 - DNA, 23 bp, Artificial sequence
  Primer
tgggactcgcatgcgagtcccac

SEQ ID NO: 3771 - DNA, 23 bp, Artificial sequence
  Primer
  misc_feature (1)..(3): n is a, c, g, or t
  misc_feature (20)..(23): n is a, c, g, or t
nnngactcgctagcgagtcnnnn

SEQ ID NO: 3772 - DNA, 23 bp, Artificial sequence
  Primer
gcggactcgctagcgagtccgcc

SEQ ID NO: 3773 - DNA, 23 bp, Artificial sequence
  Primer
gcggactcgctagcgagtccgct

SEQ ID NO: 3774 - DNA, 23 bp, Artificial sequence
  Primer
acggactcgctagcgagtccgtc

SEQ ID NO: 3775 - DNA, 23 bp, Artificial sequence
  Primer
gaggactcgctagcgagtcctcc

SEQ ID NO: 3776 - DNA, 23 bp, Artificial sequence
  Primer
gcagactcgctagcgagtctgcc

SEQ ID NO: 3777 - DNA, 23 bp, Artificial sequence
  Primer
gcggactcgctagcgagtccgca

SEQ ID NO: 3778 - DNA, 23 bp, Artificial sequence
  Primer
tcggactcgctagcgagtccgac

SEQ ID NO: 3779 - DNA, 23 bp, Artificial sequence
  Primer
gtggactcgctagcgagtccacc

SEQ ID NO: 3780 - DNA, 23 bp, Artificial sequence
  Primer
gctgactcgctagcgagtcagcc

SEQ ID NO: 3781 - DNA, 23 bp, Artificial sequence
  Primer
cccgactcgctagcgagtcgggc

SEQ ID NO: 3782 - DNA, 23 bp, Artificial sequence
  Primer
cccgactcgctagcgagtcgggt

SEQ ID NO: 3783 - DNA, 23 bp, Artificial sequence
  Primer
accgactcgctagcgagtcggtc

SEQ ID NO: 3784 - DNA, 23 bp, Artificial sequence
  Primer
cacgactcgctagcgagtcgtgc

SEQ ID NO: 3785 - DNA, 23 bp, Artificial sequence
  Primer
ccagactcgctagcgagtctggc

SEQ ID NO: 3786 - DNA, 23 bp, Artificial sequence
  Primer
cccgactcgctagcgagtcggga

SEQ ID NO: 3787 - DNA, 23 bp, Artificial sequence
  Primer
tccgactcgctagcgagtcggac

SEQ ID NO: 3788 - DNA, 23 bp, Artificial sequence
  Primer
cctgactcgctagcgagtcaggc

SEQ ID NO: 3789 - DNA, 23 bp, Artificial sequence
  Primer
ggcgactcgctagcgagtcgccc

SEQ ID NO: 3790 - DNA, 23 bp, Artificial sequence
  Primer
ggcgactcgctagcgagtcgcct

SEQ ID NO: 3791 - DNA, 23 bp, Artificial sequence
  Primer
agcgactcgctagcgagtcgctc

SEQ ID NO: 3792 - DNA, 23 bp, Artificial sequence
  Primer
gacgactcgctagcgagtcgtcc

SEQ ID NO: 3793 - DNA, 23 bp, Artificial sequence
  Primer
ggagactcgctagcgagtctccc

SEQ ID NO: 3794 - DNA, 23 bp, Artificial sequence
  Primer
ggcgactcgctagcgagtcgcca

SEQ ID NO: 3795 - DNA, 23 bp, Artificial sequence
  Primer
tgcgactcgctagcgagtcgcac

SEQ ID NO: 3796 - DNA, 23 bp, Artificial sequence
  Primer
ggtgactcgctagcgagtcaccc

SEQ ID NO: 3797 - DNA, 23 bp, Artificial sequence
  Primer
cgggactcgctagcgagtcccgt

SEQ ID NO: 3798 - DNA, 23 bp, Artificial sequence
  Primer
agggactcgctagcgagtccctg

SEQ ID NO: 3799 - DNA, 23 bp, Artificial sequence
  Primer
caggactcgctagcgagtcctgg

SEQ ID NO: 3800 - DNA, 23 bp, Artificial sequence
  Primer
cgagactcgctagcgagtctcgg

SEQ ID NO: 3801 - DNA, 23 bp, Artificial sequence
  Primer
cgggactcgctagcgagtcccga

SEQ ID NO: 3802 - DNA, 23 bp, Artificial sequence
  Primer
tgggactcgctagcgagtcccag

SEQ ID NO: 3803 - DNA, 23 bp, Artificial sequence
  Primer
ctggactcgctagcgagtccagg

SEQ ID NO: 3804 - DNA, 23 bp, Artificial sequence
  Primer
cgtgactcgctagcgagtcacgg

SEQ ID NO: 3805 - DNA, 23 bp, Artificial sequence
  Primer
ggcgactcgctagcgagtcgccg

SEQ ID NO: 3806 - DNA, 23 bp, Artificial sequence
  Primer
agcgactcgctagcgagtcgctg

SEQ ID NO: 3807 - DNA, 23 bp, Artificial sequence
  Primer
gacgactcgctagcgagtcgtcg

SEQ ID NO: 3808 - DNA, 23 bp, Artificial sequence
  Primer
ggagactcgctagcgagtctccg

SEQ ID NO: 3809 - DNA, 23 bp, Artificial sequence
  Primer
tgcgactcgctagcgagtcgcag

SEQ ID NO: 3810 - DNA, 23 bp, Artificial sequence
  Primer
ggtgactcgctagcgagtcaccg

SEQ ID NO: 3811 - DNA, 23 bp, Artificial sequence
  Primer
acggactcgctagcgagtccgtg

SEQ ID NO: 3812 - DNA, 23 bp, Artificial sequence
  Primer
ccagactcgctagcgagtctggg

SEQ ID NO: 3813 - DNA, 23 bp, Artificial sequence
  Primer
tcggactcgctagcgagtccgag

SEQ ID NO: 3814 - DNA, 23 bp, Artificial sequence
  Primer
cctgactcgctagcgagtcaggg

SEQ ID NO: 3815 - DNA, 23 bp, Artificial sequence
  Primer
cacgactcgctagcgagtcgtgg

SEQ ID NO: 3816 - DNA, 23 bp, Artificial sequence
  Primer
gccgactcgctagcgagtcggct

SEQ ID NO: 3817 - DNA, 23 bp, Artificial sequence
  Primer
gccgactcgctagcgagtcggca

SEQ ID NO: 3818 - DNA, 23 bp, Artificial sequence
  Primer
cgagactcgctagcgagtctcgc

SEQ ID NO: 3819 - DNA, 23 bp, Artificial sequence
  Primer
cgtgactcgctagcgagtcacgc

SEQ ID NO: 3820 - DNA, 23 bp, Artificial sequence
  Primer
caggactcgctagcgagtcctgc

SEQ ID NO: 3821 - DNA, 23 bp, Artificial sequence
  Primer
ctggactcgctagcgagtccagc

SEQ ID NO: 3822 - DNA, 23 bp, Artificial sequence
  Primer
gaggactcgctagcgagtcctcg

SEQ ID NO: 3823 - DNA, 23 bp, Artificial sequence
  Primer
gtggactcgctagcgagtccacg

SEQ ID NO: 3824 - DNA, 23 bp, Artificial sequence
  Primer
accgactcgctagcgagtcggtg

SEQ ID NO: 3825 - DNA, 23 bp, Artificial sequence
  Primer
tccgactcgctagcgagtcggag

SEQ ID NO: 3826 - DNA, 23 bp, Artificial sequence
  Primer
cgggactcgctagcgagtcccgc

SEQ ID NO: 3827 - DNA, 23 bp, Artificial sequence
  Primer
agggactcgctagcgagtccctc

SEQ ID NO: 3828 - DNA, 23 bp, Artificial sequence
  Primer
tgggactcgctagcgagtcccac

SEQ ID NO: 3829 - DNA, 23 bp, Artificial sequence
  Primer
  misc_feature (1)..(3): n is a, c, g, or t
  misc_feature (20)..(23): n is a, c, g, or t
nnngactcgcgcgcgagtcnnnn

SEQ ID NO: 3830 - DNA, 23 bp, Artificial sequence
  Primer
gcggactcgcgcgcgagtccgcc

SEQ ID NO: 3831 - DNA, 23 bp, Artificial sequence
  Primer
gcggactcgcgcgcgagtccgct

SEQ ID NO: 3832 - DNA, 23 bp, Artificial sequence
  Primer
acggactcgcgcgcgagtccgtc

SEQ ID NO: 3833 - DNA, 23 bp, Artificial sequence
  Primer
gaggactcgcgcgcgagtcctcc

SEQ ID NO: 3834 - DNA, 23 bp, Artificial sequence
  Primer
gcagactcgcgcgcgagtctgcc

SEQ ID NO: 3835 - DNA, 23 bp, Artificial sequence
  Primer
gcggactcgcgcgcgagtccgca

SEQ ID NO: 3836 - DNA, 23 bp, Artificial sequence
  Primer
tcggactcgcgcgcgagtccgac

SEQ ID NO: 3837 - DNA, 23 bp, Artificial sequence
  Primer
gtggactcgcgcgcgagtccacc

SEQ ID NO: 3838 - DNA, 23 bp, Artificial sequence
  Primer
gctgactcgcgcgcgagtcagcc

SEQ ID NO: 3839 - DNA, 23 bp, Artificial sequence
  Primer
cccgactcgcgcgcgagtcgggc

SEQ ID NO: 3840 - DNA, 23 bp, Artificial sequence
  Primer
cccgactcgcgcgcgagtcgggt

SEQ ID NO: 3841 - DNA, 23 bp, Artificial sequence
  Primer
accgactcgcgcgcgagtcggtc

SEQ ID NO: 3842 - DNA, 23 bp, Artificial sequence
  Primer
cacgactcgcgcgcgagtcgtgc

SEQ ID NO: 3843 - DNA, 23 bp, Artificial sequence
  Primer
ccagactcgcgcgcgagtctggc

SEQ ID NO: 3844 - DNA, 23 bp, Artificial sequence
  Primer
cccgactcgcgcgcgagtcggga

SEQ ID NO: 3845 - DNA, 23 bp, Artificial sequence
  Primer
tccgactcgcgcgcgagtcggac

SEQ ID NO: 3846 - DNA, 23 bp, Artificial sequence
  Primer
cctgactcgcgcgcgagtcaggc

SEQ ID NO: 3847 - DNA, 23 bp, Artificial sequence
  Primer
ggcgactcgcgcgcgagtcgccc

SEQ ID NO: 3848 - DNA, 23 bp, Artificial sequence
  Primer
ggcgactcgcgcgcgagtcgcct

SEQ ID NO: 3849 - DNA, 23 bp, Artificial sequence
  Primer
agcgactcgcgcgcgagtcgctc

SEQ ID NO: 3850 - DNA, 23 bp, Artificial sequence
  Primer
gacgactcgcgcgcgagtcgtcc

SEQ ID NO: 3851 - DNA, 23 bp, Artificial sequence
  Primer
ggagactcgcgcgcgagtctccc

SEQ ID NO: 3852 - DNA, 23 bp, Artificial sequence
  Primer
ggcgactcgcgcgcgagtcgcca

SEQ ID NO: 3853 - DNA, 23 bp, Artificial sequence
  Primer
tgcgactcgcgcgcgagtcgcac

SEQ ID NO: 3854 - DNA, 23 bp, Artificial sequence
  Primer
ggtgactcgcgcgcgagtcaccc

SEQ ID NO: 3855 - DNA, 23 bp, Artificial sequence
  Primer
cgggactcgcgcgcgagtcccgt

SEQ ID NO: 3856 - DNA, 23 bp, Artificial sequence
  Primer
agggactcgcgcgcgagtccctg

SEQ ID NO: 3857 - DNA, 23 bp, Artificial sequence
  Primer
caggactcgcgcgcgagtcctgg

SEQ ID NO: 3858 - DNA, 23 bp, Artificial sequence
  Primer
cgagactcgcgcgcgagtctcgg

SEQ ID NO: 3859 - DNA, 23 bp, Artificial sequence
  Primer
cgggactcgcgcgcgagtcccga

SEQ ID NO: 3860 - DNA, 23 bp, Artificial sequence
  Primer
tgggactcgcgcgcgagtcccag

SEQ ID NO: 3861 - DNA, 23 bp, Artificial sequence
  Primer
ctggactcgcgcgcgagtccagg

SEQ ID NO: 3862 - DNA, 23 bp, Artificial sequence
  Primer
cgtgactcgcgcgcgagtcacgg

SEQ ID NO: 3863 - DNA, 23 bp, Artificial sequence
  Primer
ggcgactcgcgcgcgagtcgccg

SEQ ID NO: 3864 - DNA, 23 bp, Artificial sequence
  Primer
agcgactcgcgcgcgagtcgctg

SEQ ID NO: 3865 - DNA, 23 bp, Artificial sequence
  Primer
gacgactcgcgcgcgagtcgtcg

SEQ ID NO: 3866 - DNA, 23 bp, Artificial sequence
  Primer
ggagactcgcgcgcgagtctccg

SEQ ID NO: 3867 - DNA, 23 bp, Artificial sequence
  Primer
tgcgactcgcgcgcgagtcgcag

SEQ ID NO: 3868 - DNA, 23 bp, Artificial sequence
  Primer
ggtgactcgcgcgcgagtcaccg

SEQ ID NO: 3869 - DNA, 23 bp, Artificial sequence
  Primer
acggactcgcgcgcgagtccgtg

SEQ ID NO: 3870 - DNA, 23 bp, Artificial sequence
  Primer
ccagactcgcgcgcgagtctggg

SEQ ID NO: 3871 - DNA, 23 bp, Artificial sequence
  Primer
tcggactcgcgcgcgagtccgag

SEQ ID NO: 3872 - DNA, 23 bp, Artificial sequence
  Primer
cctgactcgcgcgcgagtcaggg

SEQ ID NO: 3873 - DNA, 23 bp, Artificial sequence
  Primer
cacgactcgcgcgcgagtcgtgg

SEQ ID NO: 3874 - DNA, 23 bp, Artificial sequence
  Primer
gccgactcgcgcgcgagtcggct

SEQ ID NO: 3875 - DNA, 23 bp, Artificial sequence
  Primer
gccgactcgcgcgcgagtcggca

SEQ ID NO: 3876 - DNA, 23 bp, Artificial sequence
  Primer
cgagactcgcgcgcgagtctcgc

SEQ ID NO: 3877 - DNA, 23 bp, Artificial sequence
  Primer
cgtgactcgcgcgcgagtcacgc

SEQ ID NO: 3878 - DNA, 23 bp, Artificial sequence
  Primer
caggactcgcgcgcgagtcctgc

SEQ ID NO: 3879 - DNA, 23 bp, Artificial sequence
  Primer
ctggactcgcgcgcgagtccagc

SEQ ID NO: 3880 - DNA, 23 bp, Artificial sequence
  Primer
gaggactcgcgcgcgagtcctcg

SEQ ID NO: 3881 - DNA, 23 bp, Artificial sequence
  Primer
gtggactcgcgcgcgagtccacg

SEQ ID NO: 3882 - DNA, 23 bp, Artificial sequence
  Primer
accgactcgcgcgcgagtcggtg

SEQ ID NO: 3883 - DNA, 23 bp, Artificial sequence
  Primer
tccgactcgcgcgcgagtcggag

SEQ ID NO: 3884 - DNA, 23 bp, Artificial sequence
  Primer
cgggactcgcgcgcgagtcccgc

SEQ ID NO: 3885 - DNA, 23 bp, Artificial sequence
  Primer
agggactcgcgcgcgagtccctc

SEQ ID NO: 3886 - DNA, 23 bp, Artificial sequence
  Primer
tgggactcgcgcgcgagtcccac

SEQ ID NO: 3887 - DNA, 23 bp, Artificial sequence
  Primer
  misc_feature (1)..(3): n is a, c, g, or t
  misc_feature (20)..(23): n is a, c, g, or t
nnngactcgccggcgagtcnnnn

SEQ ID NO: 3888 - DNA, 23 bp, Artificial sequence
  Primer
gcggactcgccggcgagtccgcc

SEQ ID NO: 3889 - DNA, 23 bp, Artificial sequence
  Primer
gcggactcgccggcgagtccgct

SEQ ID NO: 3890 - DNA, 23 bp, Artificial sequence
  Primer
acggactcgccggcgagtccgtc

SEQ ID NO: 3891 - DNA, 23 bp, Artificial sequence
  Primer
gaggactcgccggcgagtcctcc

SEQ ID NO: 3892 - DNA, 23 bp, Artificial sequence
  Primer
gcagactcgccggcgagtctgcc

SEQ ID NO: 3893 - DNA, 23 bp, Artificial sequence
  Primer
gcggactcgccggcgagtccgca

SEQ ID NO: 3894 - DNA, 23 bp, Artificial sequence
  Primer
tcggactcgccggcgagtccgac

SEQ ID NO: 3895 - DNA, 23 bp, Artificial sequence
  Primer
gtggactcgccggcgagtccacc

SEQ ID NO: 3896 - DNA, 23 bp, Artificial sequence
  Primer
gctgactcgccggcgagtcagcc

SEQ ID NO: 3897 - DNA, 23 bp, Artificial sequence
  Primer
cccgactcgccggcgagtcgggc

SEQ ID NO: 3898 - DNA, 23 bp, Artificial sequence
  Primer
cccgactcgccggcgagtcgggt

SEQ ID NO: 3899 - DNA, 23 bp, Artificial sequence
  Primer
accgactcgccggcgagtcggtc

SEQ ID NO: 3900 - DNA, 23 bp, Artificial sequence
  Primer
cacgactcgccggcgagtcgtgc

SEQ ID NO: 3901 - DNA, 23 bp, Artificial sequence
  Primer
ccagactcgccggcgagtctggc

SEQ ID NO: 3902 - DNA, 23 bp, Artificial sequence
  Primer
cccgactcgccggcgagtcggga

SEQ ID NO: 3903 - DNA, 23 bp, Artificial sequence
  Primer
tccgactcgccggcgagtcggac

SEQ ID NO: 3904 - DNA, 23 bp, Artificial sequence
  Primer
cctgactcgccggcgagtcaggc

SEQ ID NO: 3905 - DNA, 23 bp, Artificial sequence
  Primer
ggcgactcgccggcgagtcgccc

SEQ ID NO: 3906 - DNA, 23 bp, Artificial sequence
  Primer
ggcgactcgccggcgagtcgcct

SEQ ID NO: 3907 - DNA, 23 bp, Artificial sequence
  Primer
agcgactcgccggcgagtcgctc

SEQ ID NO: 3908 - DNA, 23 bp, Artificial sequence
  Primer
gacgactcgccggcgagtcgtcc

SEQ ID NO: 3909 - DNA, 23 bp, Artificial sequence
  Primer
ggagactcgccggcgagtctccc

SEQ ID NO: 3910 - DNA, 23 bp, Artificial sequence
  Primer
ggcgactcgccggcgagtcgcca

SEQ ID NO: 3911 - DNA, 23 bp, Artificial sequence
  Primer
tgcgactcgccggcgagtcgcac

SEQ ID NO: 3912 - DNA, 23 bp, Artificial sequence
  Primer
ggtgactcgccggcgagtcaccc

SEQ ID NO: 3913 - DNA, 23 bp, Artificial sequence
  Primer
cgggactcgccggcgagtcccgt

SEQ ID NO: 3914 - DNA, 23 bp, Artificial sequence
  Primer
agggactcgccggcgagtccctg

SEQ ID NO: 3915 - DNA, 23 bp, Artificial sequence
  Primer
caggactcgccggcgagtcctgg

SEQ ID NO: 3916 - DNA, 23 bp, Artificial sequence
  Primer
cgagactcgccggcgagtctcgg

SEQ ID NO: 3917 - DNA, 23 bp, Artificial sequence
  Primer
cgggactcgccggcgagtcccga

SEQ ID NO: 3918 - DNA, 23 bp, Artificial sequence
  Primer
tgggactcgccggcgagtcccag

SEQ ID NO: 3919 - DNA, 23 bp, Artificial sequence
  Primer
ctggactcgccggcgagtccagg

SEQ ID NO: 3920 - DNA, 23 bp, Artificial sequence
  Primer
cgtgactcgccggcgagtcacgg

SEQ ID NO: 3921 - DNA, 23 bp, Artificial sequence
  Primer
ggcgactcgccggcgagtcgccg

SEQ ID NO: 3922 - DNA, 23 bp, Artificial sequence
  Primer
agcgactcgccggcgagtcgctg

SEQ ID NO: 3923 - DNA, 23 bp, Artificial sequence
  Primer
gacgactcgccggcgagtcgtcg

SEQ ID NO: 3924 - DNA, 23 bp, Artificial sequence
  Primer
ggagactcgccggcgagtctccg

SEQ ID NO: 3925 - DNA, 23 bp, Artificial sequence
  Primer
tgcgactcgccggcgagtcgcag

SEQ ID NO: 3926 - DNA, 23 bp, Artificial sequence
  Primer
ggtgactcgccggcgagtcaccg

SEQ ID NO: 3927 - DNA, 23 bp, Artificial sequence
  Primer
acggactcgccggcgagtccgtg

SEQ ID NO: 3928 - DNA, 23 bp, Artificial sequence
  Primer
ccagactcgccggcgagtctggg

SEQ ID NO: 3929 - DNA, 23 bp, Artificial sequence
  Primer
tcggactcgccggcgagtccgag

SEQ ID NO: 3930 - DNA, 23 bp, Artificial sequence
  Primer
cctgactcgccggcgagtcaggg

SEQ ID NO: 3931 - DNA, 23 bp, Artificial sequence
  Primer
cacgactcgccggcgagtcgtgg

SEQ ID NO: 3932 - DNA, 23 bp, Artificial sequence
  Primer
gccgactcgccggcgagtcggct

SEQ ID NO: 3933 - DNA, 23 bp, Artificial sequence
  Primer
gccgactcgccggcgagtcggca

SEQ ID NO: 3934 - DNA, 23 bp, Artificial sequence
  Primer
cgagactcgccggcgagtctcgc

SEQ ID NO: 3935 - DNA, 23 bp, Artificial sequence
  Primer
cgtgactcgccggcgagtcacgc

SEQ ID NO: 3936 - DNA, 23 bp, Artificial sequence
  Primer
caggactcgccggcgagtcctgc

SEQ ID NO: 3937 - DNA, 23 bp, Artificial sequence
  Primer
ctggactcgccggcgagtccagc

SEQ ID NO: 3938 - DNA, 23 bp, Artificial sequence
  Primer
gaggactcgccggcgagtcctcg

SEQ ID NO: 3939 - DNA, 23 bp, Artificial sequence
  Primer
gtggactcgccggcgagtccacg

SEQ ID NO: 3940 - DNA, 23 bp, Artificial sequence
  Primer
accgactcgccggcgagtcggtg

SEQ ID NO: 3941 - DNA, 23 bp, Artificial sequence
  Primer
tccgactcgccggcgagtcggag

SEQ ID NO: 3942 - DNA, 23 bp, Artificial sequence
  Primer
cgggactcgccggcgagtcccgc

SEQ ID NO: 3943 - DNA, 23 bp, Artificial sequence
  Primer
agggactcgccggcgagtccctc

SEQ ID NO: 3944 - DNA, 23 bp, Artificial sequence
  Primer
tgggactcgccggcgagtcccac

SEQ ID NO: 3945 - DNA, 23 bp, Artificial sequence
  Primer
  misc_feature (1)..(3): n is a, c, g, or t
  misc_feature (20)..(23): n is a, c, g, or t
nnngactcacatgtgagtcnnnn

SEQ ID NO: 3946 - DNA, 23 bp, Artificial sequence
  Primer
gcggactcacatgtgagtccgcc

SEQ ID NO: 3947 - DNA, 23 bp, Artificial sequence
  Primer
gcggactcacatgtgagtccgct

SEQ ID NO: 3948 - DNA, 23 bp, Artificial sequence
  Primer
acggactcacatgtgagtccgtc

SEQ ID NO: 3949 - DNA, 23 bp, Artificial sequence
  Primer
gaggactcacatgtgagtcctcc

SEQ ID NO: 3950 - DNA, 23 bp, Artificial sequence
  Primer
gcagactcacatgtgagtctgcc

SEQ ID NO: 3951 - DNA, 23 bp, Artificial sequence
  Primer
gcggactcacatgtgagtccgca

SEQ ID NO: 3952 - DNA, 23 bp, Artificial sequence
  Primer
tcggactcacatgtgagtccgac

SEQ ID NO: 3953 - DNA, 23 bp, Artificial sequence
  Primer
gtggactcacatgtgagtccacc

SEQ ID NO: 3954 - DNA, 23 bp, Artificial sequence
  Primer
gctgactcacatgtgagtcagcc

SEQ ID NO: 3955 - DNA, 23 bp, Artificial sequence
  Primer
cccgactcacatgtgagtcgggc

SEQ ID NO: 3956 - DNA, 23 bp, Artificial sequence
  Primer
cccgactcacatgtgagtcgggt

SEQ ID NO: 3957 - DNA, 23 bp, Artificial sequence
  Primer
accgactcacatgtgagtcggtc

SEQ ID NO: 3958 - DNA, 23 bp, Artificial sequence
  Primer
cacgactcacatgtgagtcgtgc

SEQ ID NO: 3959 - DNA, 23 bp, Artificial sequence
  Primer
ccagactcacatgtgagtctggc

SEQ ID NO: 3960 - DNA, 23 bp, Artificial sequence
  Primer
cccgactcacatgtgagtcggga

SEQ ID NO: 3961 - DNA, 23 bp, Artificial sequence
  Primer
tccgactcacatgtgagtcggac

SEQ ID NO: 3962 - DNA, 23 bp, Artificial sequence
  Primer
cctgactcacatgtgagtcaggc

SEQ ID NO: 3963 - DNA, 23 bp, Artificial sequence
  Primer
ggcgactcacatgtgagtcgccc

SEQ ID NO: 3964 - DNA, 23 bp, Artificial sequence
  Primer
ggcgactcacatgtgagtcgcct

SEQ ID NO: 3965 - DNA, 23 bp, Artificial sequence
  Primer
agcgactcacatgtgagtcgctc

SEQ ID NO: 3966 - DNA, 23 bp, Artificial sequence
  Primer
gacgactcacatgtgagtcgtcc

SEQ ID NO: 3967 - DNA, 23 bp, Artificial sequence
  Primer
ggagactcacatgtgagtctccc

SEQ ID NO: 3968 - DNA, 23 bp, Artificial sequence
  Primer
ggcgactcacatgtgagtcgcca

SEQ ID NO: 3969 - DNA, 23 bp, Artificial sequence
  Primer
tgcgactcacatgtgagtcgcac

SEQ ID NO: 3970 - DNA, 23 bp, Artificial sequence
  Primer
ggtgactcacatgtgagtcaccc

SEQ ID NO: 3971 - DNA, 23 bp, Artificial sequence
  Primer
cgggactcacatgtgagtcccgt

SEQ ID NO: 3972 - DNA, 23 bp, Artificial sequence
  Primer
agggactcacatgtgagtccctg

SEQ ID NO: 3973 - DNA, 23 bp, Artificial sequence
  Primer
caggactcacatgtgagtcctgg

SEQ ID NO: 3974 - DNA, 23 bp, Artificial sequence
  Primer
cgagactcacatgtgagtctcgg

SEQ ID NO: 3975 - DNA, 23 bp, Artificial sequence
  Primer
cgggactcacatgtgagtcccga

SEQ ID NO: 3976 - DNA, 23 bp, Artificial sequence
  Primer
tgggactcacatgtgagtcccag

SEQ ID NO: 3977 - DNA, 23 bp, Artificial sequence
  Primer
ctggactcacatgtgagtccagg

SEQ ID NO: 3978 - DNA, 23 bp, Artificial sequence
  Primer
cgtgactcacatgtgagtcacgg

SEQ ID NO: 3979 - DNA, 23 bp, Artificial sequence
  Primer
ggcgactcacatgtgagtcgccg

SEQ ID NO: 3980 - DNA, 23 bp, Artificial sequence
  Primer
agcgactcacatgtgagtcgctg

SEQ ID NO: 3981 - DNA, 23 bp, Artificial sequence
  Primer
gacgactcacatgtgagtcgtcg

SEQ ID NO: 3982 - DNA, 23 bp, Artificial sequence
  Primer
ggagactcacatgtgagtctccg

SEQ ID NO: 3983 - DNA, 23 bp, Artificial sequence
  Primer
tgcgactcacatgtgagtcgcag

SEQ ID NO: 3984 - DNA, 23 bp, Artificial sequence
  Primer
ggtgactcacatgtgagtcaccg

SEQ ID NO: 3985 - DNA, 23 bp, Artificial sequence
  Primer
acggactcacatgtgagtccgtg

SEQ ID NO: 3986 - DNA, 23 bp, Artificial sequence
  Primer
ccagactcacatgtgagtctggg

SEQ ID NO: 3987 - DNA, 23 bp, Artificial sequence
  Primer
tcggactcacatgtgagtccgag

SEQ ID NO: 3988 - DNA, 23 bp, Artificial sequence
  Primer
cctgactcacatgtgagtcaggg

SEQ ID NO: 3989 - DNA, 23 bp, Artificial sequence
  Primer
cacgactcacatgtgagtcgtgg

SEQ ID NO: 3990 - DNA, 23 bp, Artificial sequence
  Primer
gccgactcacatgtgagtcggct

SEQ ID NO: 3991 - DNA, 23 bp, Artificial sequence
  Primer
gccgactcacatgtgagtcggca

SEQ ID NO: 3992 - DNA, 23 bp, Artificial sequence
  Primer
cgagactcacatgtgagtctcgc

SEQ ID NO: 3993 - DNA, 23 bp, Artificial sequence
  Primer
cgtgactcacatgtgagtcacgc

SEQ ID NO: 3994 - DNA, 23 bp, Artificial sequence
  Primer
caggactcacatgtgagtcctgc

SEQ ID NO: 3995 - DNA, 23 bp, Artificial sequence
  Primer
ctggactcacatgtgagtccagc

SEQ ID NO: 3996 - DNA, 23 bp, Artificial sequence
  Primer
gaggactcacatgtgagtcctcg

SEQ ID NO: 3997 - DNA, 23 bp, Artificial sequence
  Primer
gtggactcacatgtgagtccacg

SEQ ID NO: 3998 - DNA, 23 bp, Artificial sequence
  Primer
accgactcacatgtgagtcggtg

SEQ ID NO: 3999 - DNA, 23 bp, Artificial sequence
  Primer
tccgactcacatgtgagtcggag

SEQ ID NO: 4000 - DNA, 23 bp, Artificial sequence
  Primer
cgggactcacatgtgagtcccgc

SEQ ID NO: 4001 - DNA, 23 bp, Artificial sequence
  Primer
agggactcacatgtgagtccctc

SEQ ID NO: 4002 - DNA, 23 bp, Artificial sequence
  Primer
tgggactcacatgtgagtcccac

SEQ ID NO: 4003 - DNA, 23 bp, Artificial sequence
  Primer
  misc_feature (1)..(3): n is a, c, g, or t
  misc_feature (20)..(23): n is a, c, g, or t
nnngactcactagtgagtcnnnn

SEQ ID NO: 4004 - DNA, 23 bp, Artificial sequence
  Primer
gcggactcactagtgagtccgcc

SEQ ID NO: 4005 - DNA, 23 bp, Artificial sequence
  Primer
gcggactcactagtgagtccgct

SEQ ID NO: 4006 - DNA, 23 bp, Artificial sequence
  Primer
acggactcactagtgagtccgtc

SEQ ID NO: 4007 - DNA, 23 bp, Artificial sequence
  Primer
gaggactcactagtgagtcctcc

SEQ ID NO: 4008 - DNA, 23 bp, Artificial sequence
  Primer
gcagactcactagtgagtctgcc

SEQ ID NO: 4009 - DNA, 23 bp, Artificial sequence
  Primer
gcggactcactagtgagtccgca

SEQ ID NO: 4010 - DNA, 23 bp, Artificial sequence
  Primer
tcggactcactagtgagtccgac

SEQ ID NO: 4011 - DNA, 23 bp, Artificial sequence
  Primer
gtggactcactagtgagtccacc

SEQ ID NO: 4012 - DNA, 23 bp, Artificial sequence
  Primer
gctgactcactagtgagtcagcc

SEQ ID NO: 4013 - DNA, 23 bp, Artificial sequence
  Primer
cccgactcactagtgagtcgggc

SEQ ID NO: 4014 - DNA, 23 bp, Artificial sequence
  Primer
cccgactcactagtgagtcgggt

SEQ ID NO: 4015 - DNA, 23 bp, Artificial sequence
  Primer
accgactcactagtgagtcggtc

SEQ ID NO: 4016 - DNA, 23 bp, Artificial sequence
  Primer
cacgactcactagtgagtcgtgc

SEQ ID NO: 4017 - DNA, 23 bp, Artificial sequence
  Primer
ccagactcactagtgagtctggc

SEQ ID NO: 4018 - DNA, 23 bp, Artificial sequence
  Primer
cccgactcactagtgagtcggga

SEQ ID NO: 4019 - DNA, 23 bp, Artificial sequence
  Primer
tccgactcactagtgagtcggac

SEQ ID NO: 4020 - DNA, 23 bp, Artificial sequence
  Primer
cctgactcactagtgagtcaggc

SEQ ID NO: 4021 - DNA, 23 bp, Artificial sequence
  Primer
ggcgactcactagtgagtcgccc

SEQ ID NO: 4022 - DNA, 23 bp, Artificial sequence
  Primer
ggcgactcactagtgagtcgcct

SEQ ID NO: 4023 - DNA, 23 bp, Artificial sequence
  Primer
agcgactcactagtgagtcgctc

SEQ ID NO: 4024 - DNA, 23 bp, Artificial sequence
  Primer
gacgactcactagtgagtcgtcc

SEQ ID NO: 4025 - DNA, 23 bp, Artificial sequence
  Primer
ggagactcactagtgagtctccc

SEQ ID NO: 4026 - DNA, 23 bp, Artificial sequence
  Primer
ggcgactcactagtgagtcgcca

SEQ ID NO: 4027 - DNA, 23 bp, Artificial sequence
  Primer
tgcgactcactagtgagtcgcac

SEQ ID NO: 4028 - DNA, 23 bp, Artificial sequence
  Primer
ggtgactcactagtgagtcaccc

SEQ ID NO: 4029 - DNA, 23 bp, Artificial sequence
  Primer
cgggactcactagtgagtcccgt

SEQ ID NO: 4030 - DNA, 23 bp, Artificial sequence
  Primer
agggactcactagtgagtccctg

SEQ ID NO: 4031 - DNA, 23 bp, Artificial sequence
  Primer
caggactcactagtgagtcctgg

SEQ ID NO: 4032 - DNA, 23 bp, Artificial sequence
  Primer
cgagactcactagtgagtctcgg

SEQ ID NO: 4033 - DNA, 23 bp, Artificial sequence
  Primer
cgggactcactagtgagtcccga

SEQ ID NO: 4034 - DNA, 23 bp, Artificial sequence
  Primer
tgggactcactagtgagtcccag

SEQ ID NO: 4035 - DNA, 23 bp, Artificial sequence
  Primer
ctggactcactagtgagtccagg

SEQ ID NO: 4036 - DNA, 23 bp, Artificial sequence
  Primer
cgtgactcactagtgagtcacgg

SEQ ID NO: 4037 - DNA, 23 bp, Artificial sequence
  Primer
ggcgactcactagtgagtcgccg

SEQ ID NO: 4038 - DNA, 23 bp, Artificial sequence
  Primer
agcgactcactagtgagtcgctg

SEQ ID NO: 4039 - DNA, 23 bp, Artificial sequence
  Primer
gacgactcactagtgagtcgtcg

SEQ ID NO: 4040 - DNA, 23 bp, Artificial sequence
  Primer
ggagactcactagtgagtctccg

SEQ ID NO: 4041 - DNA, 23 bp, Artificial sequence
  Primer
tgcgactcactagtgagtcgcag

SEQ ID NO: 4042 - DNA, 23 bp, Artificial sequence
  Primer
ggtgactcactagtgagtcaccg

SEQ ID NO: 4043 - DNA, 23 bp, Artificial sequence
  Primer
acggactcactagtgagtccgtg

SEQ ID NO: 4044 - DNA, 23 bp, Artificial sequence
  Primer
ccagactcactagtgagtctggg

SEQ ID NO: 4045 - DNA, 23 bp, Artificial sequence
  Primer
tcggactcactagtgagtccgag

SEQ ID NO: 4046 - DNA, 23 bp, Artificial sequence
  Primer
cctgactcactagtgagtcaggg

SEQ ID NO: 4047 - DNA, 23 bp, Artificial sequence
  Primer
cacgactcactagtgagtcgtgg

SEQ ID NO: 4048 - DNA, 23 bp, Artificial sequence
  Primer
gccgactcactagtgagtcggct

SEQ ID NO: 4049 - DNA, 23 bp, Artificial sequence
  Primer
gccgactcactagtgagtcggca

SEQ ID NO: 4050 - DNA, 23 bp, Artificial sequence
  Primer
cgagactcactagtgagtctcgc

SEQ ID NO: 4051 - DNA, 23 bp, Artificial sequence
  Primer
cgtgactcactagtgagtcacgc

SEQ ID NO: 4052 - DNA, 23 bp, Artificial sequence
  Primer
caggactcactagtgagtcctgc

SEQ ID NO: 4053 - DNA, 23 bp, Artificial sequence
  Primer
ctggactcactagtgagtccagc

SEQ ID NO: 4054 - DNA, 23 bp, Artificial sequence
  Primer
gaggactcactagtgagtcctcg

SEQ ID NO: 4055 - DNA, 23 bp, Artificial sequence
  Primer
gtggactcactagtgagtccacg

SEQ ID NO: 4056 - DNA, 23 bp, Artificial sequence
  Primer
accgactcactagtgagtcggtg

SEQ ID NO: 4057 - DNA, 23 bp, Artificial sequence
  Primer
tccgactcactagtgagtcggag

SEQ ID NO: 4058 - DNA, 23 bp, Artificial sequence
  Primer
cgggactcactagtgagtcccgc

SEQ ID NO: 4059 - DNA, 23 bp, Artificial sequence
  Primer
agggactcactagtgagtccctc

SEQ ID NO: 4060 - DNA, 23 bp, Artificial sequence
  Primer
tgggactcactagtgagtcccac

SEQ ID NO: 4061 - DNA, 23 bp, Artificial sequence
  Primer
  misc_feature (1)..(3): n is a, c, g, or t
  misc_feature (20)..(23): n is a, c, g, or t
nnngactcacgcgtgagtcnnnn

SEQ ID NO: 4062 - DNA, 23 bp, Artificial sequence
  Primer
gcggactcacgcgtgagtccgcc

SEQ ID NO: 4063 - DNA, 23 bp, Artificial sequence
  Primer
gcggactcacgcgtgagtccgct

SEQ ID NO: 4064 - DNA, 23 bp, Artificial sequence
  Primer
acggactcacgcgtgagtccgtc

SEQ ID NO: 4065 - DNA, 23 bp, Artificial sequence
  Primer
gaggactcacgcgtgagtcctcc

SEQ ID NO: 4066 - DNA, 23 bp, Artificial sequence
  Primer
gcagactcacgcgtgagtctgcc

SEQ ID NO: 4067 - DNA, 23 bp, Artificial sequence
  Primer
gcggactcacgcgtgagtccgca

SEQ ID NO: 4068 - DNA, 23 bp, Artificial sequence
  Primer
tcggactcacgcgtgagtccgac

SEQ ID NO: 4069 - DNA, 23 bp, Artificial sequence
  Primer
gtggactcacgcgtgagtccacc

SEQ ID NO: 4070 - DNA, 23 bp, Artificial sequence
  Primer
gctgactcacgcgtgagtcagcc

SEQ ID NO: 4071 - DNA, 23 bp, Artificial sequence
  Primer
cccgactcacgcgtgagtcgggc

SEQ ID NO: 4072 - DNA, 23 bp, Artificial sequence
  Primer
cccgactcacgcgtgagtcgggt

SEQ ID NO: 4073 - DNA, 23 bp, Artificial sequence
  Primer
accgactcacgcgtgagtcggtc

SEQ ID NO: 4074 - DNA, 23 bp, Artificial sequence
  Primer
cacgactcacgcgtgagtcgtgc

SEQ ID NO: 4075 - DNA, 23 bp, Artificial sequence
  Primer
ccagactcacgcgtgagtctggc

SEQ ID NO: 4076 - DNA, 23 bp, Artificial sequence
  Primer
cccgactcacgcgtgagtcggga

SEQ ID NO: 4077 - DNA, 23 bp, Artificial sequence
  Primer
tccgactcacgcgtgagtcggac

SEQ ID NO: 4078 - DNA, 23 bp, Artificial sequence
  Primer
cctgactcacgcgtgagtcaggc

SEQ ID NO: 4079 - DNA, 23 bp, Artificial sequence
  Primer
ggcgactcacgcgtgagtcgccc

SEQ ID NO: 4080 - DNA, 23 bp, Artificial sequence
  Primer
ggcgactcacgcgtgagtcgcct

SEQ ID NO: 4081 - DNA, 23 bp, Artificial sequence
  Primer
agcgactcacgcgtgagtcgctc

SEQ ID NO: 4082 - DNA, 23 bp, Artificial sequence
  Primer
gacgactcacgcgtgagtcgtcc

SEQ ID NO: 4083 - DNA, 23 bp, Artificial sequence
  Primer
ggagactcacgcgtgagtctccc

SEQ ID NO: 4084 - DNA, 23 bp, Artificial sequence
  Primer
ggcgactcacgcgtgagtcgcca

SEQ ID NO: 4085 - DNA, 23 bp, Artificial sequence
  Primer
tgcgactcacgcgtgagtcgcac

SEQ ID NO: 4086 - DNA, 23 bp, Artificial sequence
  Primer
ggtgactcacgcgtgagtcaccc

SEQ ID NO: 4087 - DNA, 23 bp, Artificial sequence
  Primer
cgggactcacgcgtgagtcccgt

SEQ ID NO: 4088 - DNA, 23 bp, Artificial sequence
  Primer
agggactcacgcgtgagtccctg

SEQ ID NO: 4089 - DNA, 23 bp, Artificial sequence
  Primer
caggactcacgcgtgagtcctgg

SEQ ID NO: 4090 - DNA, 23 bp, Artificial sequence
  Primer
cgagactcacgcgtgagtctcgg

SEQ ID NO: 4091 - DNA, 23 bp, Artificial sequence
  Primer
cgggactcacgcgtgagtcccga

SEQ ID NO: 4092 - DNA, 23 bp, Artificial sequence
  Primer
tgggactcacgcgtgagtcccag

SEQ ID NO: 4093 - DNA, 23 bp, Artificial sequence
  Primer
ctggactcacgcgtgagtccagg

SEQ ID NO: 4094 - DNA, 23 bp, Artificial sequence
  Primer
cgtgactcacgcgtgagtcacgg

SEQ ID NO: 4095 - DNA, 23 bp, Artificial sequence
  Primer
ggcgactcacgcgtgagtcgccg

SEQ ID NO: 4096 - DNA, 23 bp, Artificial sequence
  Primer
agcgactcacgcgtgagtcgctg

SEQ ID NO: 4097 - DNA, 23 bp, Artificial sequence
  Primer
gacgactcacgcgtgagtcgtcg

SEQ ID NO: 4098 - DNA, 23 bp, Artificial sequence
  Primer
ggagactcacgcgtgagtctccg

SEQ ID NO: 4099 - DNA, 23 bp, Artificial sequence
  Primer
tgcgactcacgcgtgagtcgcag

SEQ ID NO: 4100 - DNA, 23 bp, Artificial sequence
  Primer
ggtgactcacgcgtgagtcaccg

SEQ ID NO: 4101 - DNA, 23 bp, Artificial sequence
  Primer
acggactcacgcgtgagtccgtg

SEQ ID NO: 4102 - DNA, 23 bp, Artificial sequence
  Primer
ccagactcacgcgtgagtctggg

SEQ ID NO: 4103 - DNA, 23 bp, Artificial sequence
  Primer
tcggactcacgcgtgagtccgag

SEQ ID NO: 4104 - DNA, 23 bp, Artificial sequence
  Primer
cctgactcacgcgtgagtcaggg

SEQ ID NO: 4105 - DNA, 23 bp, Artificial sequence
  Primer
cacgactcacgcgtgagtcgtgg

SEQ ID NO: 4106 - DNA, 23 bp, Artificial sequence
  Primer
gccgactcacgcgtgagtcggct

SEQ ID NO: 4107 - DNA, 23 bp, Artificial sequence
  Primer
gccgactcacgcgtgagtcggca

SEQ ID NO: 4108 - DNA, 23 bp, Artificial sequence
  Primer
cgagactcacgcgtgagtctcgc

SEQ ID NO: 4109 - DNA, 23 bp, Artificial sequence
  Primer
cgtgactcacgcgtgagtcacgc

SEQ ID NO: 4110 - DNA, 23 bp, Artificial sequence
  Primer
caggactcacgcgtgagtcctgc

SEQ ID NO: 4111 - DNA, 23 bp, Artificial sequence
  Primer
ctggactcacgcgtgagtccagc

SEQ ID NO: 4112 - DNA, 23 bp, Artificial sequence
  Primer
gaggactcacgcgtgagtcctcg

SEQ ID NO: 4113 - DNA, 23 bp, Artificial sequence
  Primer
gtggactcacgcgtgagtccacg

SEQ ID NO: 4114 - DNA, 23 bp, Artificial sequence
  Primer
accgactcacgcgtgagtcggtg

SEQ ID NO: 4115 - DNA, 23 bp, Artificial sequence
  Primer
tccgactcacgcgtgagtcggag

SEQ ID NO: 4116 - DNA, 23 bp, Artificial sequence
  Primer
cgggactcacgcgtgagtcccgc

SEQ ID NO: 4117 - DNA, 23 bp, Artificial sequence
  Primer
agggactcacgcgtgagtccctc

SEQ ID NO: 4118 - DNA, 23 bp, Artificial sequence
  Primer
tgggactcacgcgtgagtcccac

SEQ ID NO: 4119 - DNA, 23 bp, Artificial sequence
  Primer
  misc_feature (1)..(3): n is a, c, g, or t
  misc_feature (20)..(23): n is a, c, g, or t
nnngactcaccggtgagtcnnnn

SEQ ID NO: 4120 - DNA, 23 bp, Artificial sequence
  Primer
gcggactcaccggtgagtccgcc

SEQ ID NO: 4121 - DNA, 23 bp, Artificial sequence
  Primer
gcggactcaccggtgagtccgct

SEQ ID NO: 4122 - DNA, 23 bp, Artificial sequence
  Primer
acggactcaccggtgagtccgtc

SEQ ID NO: 4123 - DNA, 23 bp, Artificial sequence
  Primer
gaggactcaccggtgagtcctcc

SEQ ID NO: 4124 - DNA, 23 bp, Artificial sequence
  Primer
gcagactcaccggtgagtctgcc

SEQ ID NO: 4125 - DNA, 23 bp, Artificial sequence
  Primer
gcggactcaccggtgagtccgca

SEQ ID NO: 4126 - DNA, 23 bp, Artificial sequence
  Primer
tcggactcaccggtgagtccgac

SEQ ID NO: 4127 - DNA, 23 bp, Artificial sequence
  Primer
gtggactcaccggtgagtccacc

SEQ ID NO: 4128 - DNA, 23 bp, Artificial sequence
  Primer
gctgactcaccggtgagtcagcc

SEQ ID NO: 4129 - DNA, 23 bp, Artificial sequence
  Primer
cccgactcaccggtgagtcgggc

SEQ ID NO: 4130 - DNA, 23 bp, Artificial sequence
  Primer
cccgactcaccggtgagtcgggt

SEQ ID NO: 4131 - DNA, 23 bp, Artificial sequence
  Primer
accgactcaccggtgagtcggtc

SEQ ID NO: 4132 - DNA, 23 bp, Artificial sequence
  Primer
cacgactcaccggtgagtcgtgc

SEQ ID NO: 4133 - DNA, 23 bp, Artificial sequence
  Primer
ccagactcaccggtgagtctggc

SEQ ID NO: 4134 - DNA, 23 bp, Artificial sequence
  Primer
cccgactcaccggtgagtcggga

SEQ ID NO: 4135 - DNA, 23 bp, Artificial sequence
  Primer
tccgactcaccggtgagtcggac

SEQ ID NO: 4136 - DNA, 23 bp, Artificial sequence
  Primer
cctgactcaccggtgagtcaggc

SEQ ID NO: 4137 - DNA, 23 bp, Artificial sequence
  Primer
ggcgactcaccggtgagtcgccc

SEQ ID NO: 4138 - DNA, 23 bp, Artificial sequence
  Primer
ggcgactcaccggtgagtcgcct

SEQ ID NO: 4139 - DNA, 23 bp, Artificial sequence
  Primer
agcgactcaccggtgagtcgctc

SEQ ID NO: 4140 - DNA, 23 bp, Artificial sequence
  Primer
gacgactcaccggtgagtcgtcc

SEQ ID NO: 4141 - DNA, 23 bp, Artificial sequence
  Primer
ggagactcaccggtgagtctccc

SEQ ID NO: 4142 - DNA, 23 bp, Artificial sequence
  Primer
ggcgactcaccggtgagtcgcca

SEQ ID NO: 4143 - DNA, 23 bp, Artificial sequence
  Primer
tgcgactcaccggtgagtcgcac

SEQ ID NO: 4144 - DNA, 23 bp, Artificial sequence
  Primer
ggtgactcaccggtgagtcaccc

SEQ ID NO: 4145 - DNA, 23 bp, Artificial sequence
  Primer
cgggactcaccggtgagtcccgt

SEQ ID NO: 4146 - DNA, 23 bp, Artificial sequence
  Primer
agggactcaccggtgagtccctg

SEQ ID NO: 4147 - DNA, 23 bp, Artificial sequence
  Primer
caggactcaccggtgagtcctgg

SEQ ID NO: 4148 - DNA, 23 bp, Artificial sequence
  Primer
cgagactcaccggtgagtctcgg

SEQ ID NO: 4149 - DNA, 23 bp, Artificial sequence
  Primer
cgggactcaccggtgagtcccga

SEQ ID NO: 4150 - DNA, 23 bp, Artificial sequence
  Primer
tgggactcaccggtgagtcccag

SEQ ID NO: 4151 - DNA, 23 bp, Artificial sequence
  Primer
ctggactcaccggtgagtccagg

SEQ ID NO: 4152 - DNA, 23 bp, Artificial sequence
  Primer
cgtgactcaccggtgagtcacgg

SEQ ID NO: 4153 - DNA, 23 bp, Artificial sequence
  Primer
ggcgactcaccggtgagtcgccg

SEQ ID NO: 4154 - DNA, 23 bp, Artificial sequence
  Primer
agcgactcaccggtgagtcgctg

SEQ ID NO: 4155 - DNA, 23 bp, Artificial sequence
  Primer
gacgactcaccggtgagtcgtcg

SEQ ID NO: 4156 - DNA, 23 bp, Artificial sequence
  Primer
ggagactcaccggtgagtctccg

SEQ ID NO: 4157 - DNA, 23 bp, Artificial sequence
  Primer
tgcgactcaccggtgagtcgcag

SEQ ID NO: 4158 - DNA, 23 bp, Artificial sequence
  Primer
ggtgactcaccggtgagtcaccg

SEQ ID NO: 4159 - DNA, 23 bp, Artificial sequence
  Primer
acggactcaccggtgagtccgtg

SEQ ID NO: 4160 - DNA, 23 bp, Artificial sequence
  Primer
ccagactcaccggtgagtctggg

SEQ ID NO: 4161 - DNA, 23 bp, Artificial sequence
  Primer
tcggactcaccggtgagtccgag

SEQ ID NO: 4162 - DNA, 23 bp, Artificial sequence
  Primer
cctgactcaccggtgagtcaggg

SEQ ID NO: 4163 - DNA, 23 bp, Artificial sequence
  Primer
cacgactcaccggtgagtcgtgg

SEQ ID NO: 4164 - DNA, 23 bp, Artificial sequence
  Primer
gccgactcaccggtgagtcggct

SEQ ID NO: 4165 - DNA, 23 bp, Artificial sequence
  Primer
gccgactcaccggtgagtcggca

SEQ ID NO: 4166 - DNA, 23 bp, Artificial sequence
  Primer
cgagactcaccggtgagtctcgc

SEQ ID NO: 4167 - DNA, 23 bp, Artificial sequence
  Primer
cgtgactcaccggtgagtcacgc

SEQ ID NO: 4168 - DNA, 23 bp, Artificial sequence
  Primer
caggactcaccggtgagtcctgc

SEQ ID NO: 4169 - DNA, 23 bp, Artificial sequence
  Primer
ctggactcaccggtgagtccagc

SEQ ID NO: 4170 - DNA, 23 bp, Artificial sequence
  Primer
gaggactcaccggtgagtcctcg

SEQ ID NO: 4171 - DNA, 23 bp, Artificial sequence
  Primer
gtggactcaccggtgagtccacg

SEQ ID NO: 4172 - DNA, 23 bp, Artificial sequence
  Primer
accgactcaccggtgagtcggtg

SEQ ID NO: 4173 - DNA, 23 bp, Artificial sequence
  Primer
tccgactcaccggtgagtcggag

SEQ ID NO: 4174 - DNA, 23 bp, Artificial sequence
  Primer
cgggactcaccggtgagtcccgc

SEQ ID NO: 4175 - DNA, 23 bp, Artificial sequence
  Primer
agggactcaccggtgagtccctc

SEQ ID NO: 4176 - DNA, 23 bp, Artificial sequence
  Primer
tgggactcaccggtgagtcccac

SEQ ID NO: 4177 - DNA, 23 bp, Artificial sequence
  Primer
  misc_feature (1)..(3): n is a, c, g, or t
  misc_feature (20)..(23): n is a, c, g, or t
nnngactcggatccgagtcnnnn

SEQ ID NO: 4178 - DNA, 23 bp, Artificial sequence
  Primer
gcggactcggatccgagtccgcc

SEQ ID NO: 4179 - DNA, 23 bp, Artificial sequence
  Primer
gcggactcggatccgagtccgct

SEQ ID NO: 4180 - DNA, 23 bp, Artificial sequence
  Primer
acggactcggatccgagtccgtc

SEQ ID NO: 4181 - DNA, 23 bp, Artificial sequence
  Primer
gaggactcggatccgagtcctcc

SEQ ID NO: 4182 - DNA, 23 bp, Artificial sequence
  Primer
gcagactcggatccgagtctgcc

SEQ ID NO: 4183 - DNA, 23 bp, Artificial sequence
  Primer
gcggactcggatccgagtccgca

SEQ ID NO: 4184 - DNA, 23 bp, Artificial sequence
  Primer
tcggactcggatccgagtccgac

SEQ ID NO: 4185 - DNA, 23 bp, Artificial sequence
  Primer
gtggactcggatccgagtccacc

SEQ ID NO: 4186 - DNA, 23 bp, Artificial sequence
  Primer
gctgactcggatccgagtcagcc

SEQ ID NO: 4187 - DNA, 23 bp, Artificial sequence
  Primer
cccgactcggatccgagtcgggc

SEQ ID NO: 4188 - DNA, 23 bp, Artificial sequence
  Primer
cccgactcggatccgagtcgggt

SEQ ID NO: 4189 - DNA, 23 bp, Artificial sequence
  Primer
accgactcggatccgagtcggtc

SEQ ID NO: 4190 - DNA, 23 bp, Artificial sequence
  Primer
cacgactcggatccgagtcgtgc

SEQ ID NO: 4191 - DNA, 23 bp, Artificial sequence
  Primer
ccagactcggatccgagtctggc

SEQ ID NO: 4192 - DNA, 23 bp, Artificial sequence
  Primer
cccgactcggatccgagtcggga

SEQ ID NO: 4193 - DNA, 23 bp, Artificial sequence
  Primer
tccgactcggatccgagtcggac

SEQ ID NO: 4194 - DNA, 23 bp, Artificial sequence
  Primer
cctgactcggatccgagtcaggc

SEQ ID NO: 4195 - DNA, 23 bp, Artificial sequence
  Primer
ggcgactcggatccgagtcgccc

SEQ ID NO: 4196 - DNA, 23 bp, Artificial sequence
  Primer
ggcgactcggatccgagtcgcct

SEQ ID NO: 4197 - DNA, 23 bp, Artificial sequence
  Primer
agcgactcggatccgagtcgctc

SEQ ID NO: 4198 - DNA, 23 bp, Artificial sequence
  Primer
gacgactcggatccgagtcgtcc

SEQ ID NO: 4199 - DNA, 23 bp, Artificial sequence
  Primer
ggagactcggatccgagtctccc

SEQ ID NO: 4200 - DNA, 23 bp, Artificial sequence
  Primer
ggcgactcggatccgagtcgcca

SEQ ID NO: 4201 - DNA, 23 bp, Artificial sequence
  Primer
tgcgactcggatccgagtcgcac

SEQ ID NO: 4202 - DNA, 23 bp, Artificial sequence
  Primer
ggtgactcggatccgagtcaccc

SEQ ID NO: 4203 - DNA, 23 bp, Artificial sequence
  Primer
cgggactcggatccgagtcccgt

SEQ ID NO: 4204 - DNA, 23 bp, Artificial sequence
  Primer
agggactcggatccgagtccctg

SEQ ID NO: 4205 - DNA, 23 bp, Artificial sequence
  Primer
caggactcggatccgagtcctgg

SEQ ID NO: 4206 - DNA, 23 bp, Artificial sequence
  Primer
cgagactcggatccgagtctcgg

SEQ ID NO: 4207 - DNA, 23 bp, Artificial sequence
  Primer
cgggactcggatccgagtcccga

SEQ ID NO: 4208 - DNA, 23 bp, Artificial sequence
  Primer
tgggactcggatccgagtcccag

SEQ ID NO: 4209 - DNA, 23 bp, Artificial sequence
  Primer
ctggactcggatccgagtccagg

SEQ ID NO: 4210 - DNA, 23 bp, Artificial sequence
  Primer
cgtgactcggatccgagtcacgg

SEQ ID NO: 4211 - DNA, 23 bp, Artificial sequence
  Primer
ggcgactcggatccgagtcgccg

SEQ ID NO: 4212 - DNA, 23 bp, Artificial sequence
  Primer
agcgactcggatccgagtcgctg

SEQ ID NO: 4213 - DNA, 23 bp, Artificial sequence
  Primer
gacgactcggatccgagtcgtcg

SEQ ID NO: 4214 - DNA, 23 bp, Artificial sequence
  Primer
ggagactcggatccgagtctccg

SEQ ID NO: 4215 - DNA, 23 bp, Artificial sequence
  Primer
tgcgactcggatccgagtcgcag

SEQ ID NO: 4216 - DNA, 23 bp, Artificial sequence
  Primer
ggtgactcggatccgagtcaccg

SEQ ID NO: 4217 - DNA, 23 bp, Artificial sequence
  Primer
acggactcggatccgagtccgtg

SEQ ID NO: 4218 - DNA, 23 bp, Artificial sequence
  Primer
ccagactcggatccgagtctggg

SEQ ID NO: 4219 - DNA, 23 bp, Artificial sequence
  Primer
tcggactcggatccgagtccgag

SEQ ID NO: 4220 - DNA, 23 bp, Artificial sequence
  Primer
cctgactcggatccgagtcaggg

SEQ ID NO: 4221 - DNA, 23 bp, Artificial sequence
  Primer
cacgactcggatccgagtcgtgg

SEQ ID NO: 4222 - DNA, 23 bp, Artificial sequence
  Primer
gccgactcggatccgagtcggct

SEQ ID NO: 4223 - DNA, 23 bp, Artificial sequence
  Primer
gccgactcggatccgagtcggca

SEQ ID NO: 4224 - DNA, 23 bp, Artificial sequence
  Primer
cgagactcggatccgagtctcgc

SEQ ID NO: 4225 - DNA, 23 bp, Artificial sequence
  Primer
cgtgactcggatccgagtcacgc

SEQ ID NO: 4226 - DNA, 23 bp, Artificial sequence
  Primer
caggactcggatccgagtcctgc

SEQ ID NO: 4227 - DNA, 23 bp, Artificial sequence
  Primer
ctggactcggatccgagtccagc

SEQ ID NO: 4228 - DNA, 23 bp, Artificial sequence
  Primer
gaggactcggatccgagtcctcg

SEQ ID NO: 4229 - DNA, 23 bp, Artificial sequence
  Primer
gtggactcggatccgagtccacg

SEQ ID NO: 4230 - DNA, 23 bp, Artificial sequence
  Primer
accgactcggatccgagtcggtg

SEQ ID NO: 4231 - DNA, 23 bp, Artificial sequence
  Primer
tccgactcggatccgagtcggag

SEQ ID NO: 4232 - DNA, 23 bp, Artificial sequence
  Primer
cgggactcggatccgagtcccgc

SEQ ID NO: 4233 - DNA, 23 bp, Artificial sequence
  Primer
agggactcggatccgagtccctc

SEQ ID NO: 4234 - DNA, 23 bp, Artificial sequence
  Primer
tgggactcggatccgagtcccac

SEQ ID NO: 4235 - DNA, 23 bp, Artificial sequence
  Primer
  misc_feature (1)..(3): n is a, c, g, or t
  misc_feature (20)..(23): n is a, c, g, or t
nnngactcggtaccgagtcnnnn

SEQ ID NO: 4236 - DNA, 23 bp, Artificial sequence
  Primer
gcggactcggtaccgagtccgcc

SEQ ID NO: 4237 - DNA, 23 bp, Artificial sequence
  Primer
gcggactcggtaccgagtccgct

SEQ ID NO: 4238 - DNA, 23 bp, Artificial sequence
  Primer
acggactcggtaccgagtccgtc

SEQ ID NO: 4239 - DNA, 23 bp, Artificial sequence
  Primer
gaggactcggtaccgagtcctcc

SEQ ID NO: 4240 - DNA, 23 bp, Artificial sequence
  Primer
gcagactcggtaccgagtctgcc

SEQ ID NO: 4241 - DNA, 23 bp, Artificial sequence
  Primer
gcggactcggtaccgagtccgca

SEQ ID NO: 4242 - DNA, 23 bp, Artificial sequence
  Primer
tcggactcggtaccgagtccgac

SEQ ID NO: 4243 - DNA, 23 bp, Artificial sequence
  Primer
gtggactcggtaccgagtccacc

SEQ ID NO: 4244 - DNA, 23 bp, Artificial sequence
  Primer
gctgactcggtaccgagtcagcc

SEQ ID NO: 4245 - DNA, 23 bp, Artificial sequence
  Primer
cccgactcggtaccgagtcgggc

SEQ ID NO: 4246 - DNA, 23 bp, Artificial sequence
  Primer
cccgactcggtaccgagtcgggt

SEQ ID NO: 4247 - DNA, 23 bp, Artificial sequence
  Primer
accgactcggtaccgagtcggtc

SEQ ID NO: 4248 - DNA, 23 bp, Artificial sequence
  Primer
cacgactcggtaccgagtcgtgc

SEQ ID NO: 4249 - DNA, 23 bp, Artificial sequence
  Primer
ccagactcggtaccgagtctggc

SEQ ID NO: 4250 - DNA, 23 bp, Artificial sequence
  Primer
cccgactcggtaccgagtcggga

SEQ ID NO: 4251 - DNA, 23 bp, Artificial sequence
  Primer
tccgactcggtaccgagtcggac

SEQ ID NO: 4252 - DNA, 23 bp, Artificial sequence
  Primer
cctgactcggtaccgagtcaggc

SEQ ID NO: 4253 - DNA, 23 bp, Artificial sequence
  Primer
ggcgactcggtaccgagtcgccc

SEQ ID NO: 4254 - DNA, 23 bp, Artificial sequence
  Primer
ggcgactcggtaccgagtcgcct

SEQ ID NO: 4255 - DNA, 23 bp, Artificial sequence
  Primer
agcgactcggtaccgagtcgctc

SEQ ID NO: 4256 - DNA, 23 bp, Artificial sequence
  Primer
gacgactcggtaccgagtcgtcc

SEQ ID NO: 4257 - DNA, 23 bp, Artificial sequence
  Primer
ggagactcggtaccgagtctccc

SEQ ID NO: 4258 - DNA, 23 bp, Artificial sequence
  Primer
ggcgactcggtaccgagtcgcca

SEQ ID NO: 4259 - DNA, 23 bp, Artificial sequence
  Primer
tgcgactcggtaccgagtcgcac

SEQ ID NO: 4260 - DNA, 23 bp, Artificial sequence
  Primer
ggtgactcggtaccgagtcaccc

SEQ ID NO: 4261 - DNA, 23 bp, Artificial sequence
  Primer
cgggactcggtaccgagtcccgt

SEQ ID NO: 4262 - DNA, 23 bp, Artificial sequence
  Primer
agggactcggtaccgagtccctg

SEQ ID NO: 4263 - DNA, 23 bp, Artificial sequence
  Primer
caggactcggtaccgagtcctgg

SEQ ID NO: 4264 - DNA, 23 bp, Artificial sequence
  Primer
cgagactcggtaccgagtctcgg

SEQ ID NO: 4265 - DNA, 23 bp, Artificial sequence
  Primer
cgggactcggtaccgagtcccga

SEQ ID NO: 4266 - DNA, 23 bp, Artificial sequence
  Primer
tgggactcggtaccgagtcccag

SEQ ID NO: 4267 - DNA, 23 bp, Artificial sequence
  Primer
ctggactcggtaccgagtccagg

SEQ ID NO: 4268 - DNA, 23 bp, Artificial sequence
  Primer
cgtgactcggtaccgagtcacgg

SEQ ID NO: 4269 - DNA, 23 bp, Artificial sequence
  Primer
ggcgactcggtaccgagtcgccg

SEQ ID NO: 4270 - DNA, 23 bp, Artificial sequence
  Primer
agcgactcggtaccgagtcgctg

SEQ ID NO: 4271 - DNA, 23 bp, Artificial sequence
  Primer
gacgactcggtaccgagtcgtcg

SEQ ID NO: 4272 - DNA, 23 bp, Artificial sequence
  Primer
ggagactcggtaccgagtctccg

SEQ ID NO: 4273 - DNA, 23 bp, Artificial sequence
  Primer
tgcgactcggtaccgagtcgcag

SEQ ID NO: 4274 - DNA, 23 bp, Artificial sequence
  Primer
ggtgactcggtaccgagtcaccg

SEQ ID NO: 4275 - DNA, 23 bp, Artificial sequence
  Primer
acggactcggtaccgagtccgtg

SEQ ID NO: 4276 - DNA, 23 bp, Artificial sequence
  Primer
ccagactcggtaccgagtctggg

SEQ ID NO: 4277 - DNA, 23 bp, Artificial sequence
  Primer
tcggactcggtaccgagtccgag

SEQ ID NO: 4278 - DNA, 23 bp, Artificial sequence
  Primer
cctgactcggtaccgagtcaggg

SEQ ID NO: 4279 - DNA, 23 bp, Artificial sequence
  Primer
cacgactcggtaccgagtcgtgg

SEQ ID NO: 4280 - DNA, 23 bp, Artificial sequence
  Primer
gccgactcggtaccgagtcggct

SEQ ID NO: 4281 - DNA, 23 bp, Artificial sequence
  Primer
gccgactcggtaccgagtcggca

SEQ ID NO: 4282 - DNA, 23 bp, Artificial sequence
  Primer
cgagactcggtaccgagtctcgc

SEQ ID NO: 4283 - DNA, 23 bp, Artificial sequence
  Primer
cgtgactcggtaccgagtcacgc

SEQ ID NO: 4284 - DNA, 23 bp, Artificial sequence
  Primer
caggactcggtaccgagtcctgc

SEQ ID NO: 4285 - DNA, 23 bp, Artificial sequence
  Primer
ctggactcggtaccgagtccagc

SEQ ID NO: 4286 - DNA, 23 bp, Artificial sequence
  Primer
gaggactcggtaccgagtcctcg

SEQ ID NO: 4287 - DNA, 23 bp, Artificial sequence
  Primer
gtggactcggtaccgagtccacg

SEQ ID NO: 4288 - DNA, 23 bp, Artificial sequence
  Primer
accgactcggtaccgagtcggtg

SEQ ID NO: 4289 - DNA, 23 bp, Artificial sequence
  Primer
tccgactcggtaccgagtcggag

SEQ ID NO: 4290 - DNA, 23 bp, Artificial sequence
  Primer
cgggactcggtaccgagtcccgc

SEQ ID NO: 4291 - DNA, 23 bp, Artificial sequence
  Primer
agggactcggtaccgagtccctc

SEQ ID NO: 4292 - DNA, 23 bp, Artificial sequence
  Primer
tgggactcggtaccgagtcccac

SEQ ID NO: 4293 - DNA, 23 bp, Artificial sequence
  Primer
  misc_feature (1)..(3): n is a, c, g, or t
  misc_feature (20)..(23): n is a, c, g, or t
nnngactcgggcccgagtcnnnn

SEQ ID NO: 4294 - DNA, 23 bp, Artificial sequence
  Primer
gcggactcgggcccgagtccgcc

SEQ ID NO: 4295 - DNA, 23 bp, Artificial sequence
  Primer
gcggactcgggcccgagtccgct

SEQ ID NO: 4296 - DNA, 23 bp, Artificial sequence
  Primer
acggactcgggcccgagtccgtc

SEQ ID NO: 4297 - DNA, 23 bp, Artificial sequence
  Primer
gaggactcgggcccgagtcctcc

SEQ ID NO: 4298 - DNA, 23 bp, Artificial sequence
  Primer
gcagactcgggcccgagtctgcc

SEQ ID NO: 4299 - DNA, 23 bp, Artificial sequence
  Primer
gcggactcgggcccgagtccgca

SEQ ID NO: 4300 - DNA, 23 bp, Artificial sequence
  Primer
tcggactcgggcccgagtccgac

SEQ ID NO: 4301 - DNA, 23 bp, Artificial sequence
  Primer
gtggactcgggcccgagtccacc

SEQ ID NO: 4302 - DNA, 23 bp, Artificial sequence
  Primer
gctgactcgggcccgagtcagcc

SEQ ID NO: 4303 - DNA, 23 bp, Artificial sequence
  Primer
cccgactcgggcccgagtcgggc

SEQ ID NO: 4304 - DNA, 23 bp, Artificial sequence
  Primer
cccgactcgggcccgagtcgggt

SEQ ID NO: 4305 - DNA, 23 bp, Artificial sequence
  Primer
accgactcgggcccgagtcggtc

SEQ ID NO: 4306 - DNA, 23 bp, Artificial sequence
  Primer
cacgactcgggcccgagtcgtgc

SEQ ID NO: 4307 - DNA, 23 bp, Artificial sequence
  Primer
ccagactcgggcccgagtctggc

SEQ ID NO: 4308 - DNA, 23 bp, Artificial sequence
  Primer
cccgactcgggcccgagtcggga

SEQ ID NO: 4309 - DNA, 23 bp, Artificial sequence
  Primer
tccgactcgggcccgagtcggac

SEQ ID NO: 4310 - DNA, 23 bp, Artificial sequence
  Primer
cctgactcgggcccgagtcaggc

SEQ ID NO: 4311 - DNA, 23 bp, Artificial sequence
  Primer
ggcgactcgggcccgagtcgccc

SEQ ID NO: 4312 - DNA, 23 bp, Artificial sequence
  Primer
ggcgactcgggcccgagtcgcct

SEQ ID NO: 4313 - DNA, 23 bp, Artificial sequence
  Primer
agcgactcgggcccgagtcgctc

SEQ ID NO: 4314 - DNA, 23 bp, Artificial sequence
  Primer
gacgactcgggcccgagtcgtcc

SEQ ID NO: 4315 - DNA, 23 bp, Artificial sequence
  Primer
ggagactcgggcccgagtctccc

SEQ ID NO: 4316 - DNA, 23 bp, Artificial sequence
  Primer
ggcgactcgggcccgagtcgcca

SEQ ID NO: 4317 - DNA, 23 bp, Artificial sequence
  Primer
tgcgactcgggcccgagtcgcac

SEQ ID NO: 4318 - DNA, 23 bp, Artificial sequence
  Primer
ggtgactcgggcccgagtcaccc

SEQ ID NO: 4319 - DNA, 23 bp, Artificial sequence
  Primer
cgggactcgggcccgagtcccgt

SEQ ID NO: 4320 - DNA, 23 bp, Artificial sequence
  Primer
agggactcgggcccgagtccctg

SEQ ID NO: 4321 - DNA, 23 bp, Artificial sequence
  Primer
caggactcgggcccgagtcctgg

SEQ ID NO: 4322 - DNA, 23 bp, Artificial sequence
  Primer
cgagactcgggcccgagtctcgg

SEQ ID NO: 4323 - DNA, 23 bp, Artificial sequence
  Primer
cgggactcgggcccgagtcccga

SEQ ID NO: 4324 - DNA, 23 bp, Artificial sequence
  Primer
tgggactcgggcccgagtcccag

SEQ ID NO: 4325 - DNA, 23 bp, Artificial sequence
  Primer
ctggactcgggcccgagtccagg

SEQ ID NO: 4326 - DNA, 23 bp, Artificial sequence
  Primer
cgtgactcgggcccgagtcacgg

SEQ ID NO: 4327 - DNA, 23 bp, Artificial sequence
  Primer
ggcgactcgggcccgagtcgccg

SEQ ID NO: 4328 - DNA, 23 bp, Artificial sequence
  Primer
agcgactcgggcccgagtcgctg

SEQ ID NO: 4329 - DNA, 23 bp, Artificial sequence
  Primer
gacgactcgggcccgagtcgtcg

SEQ ID NO: 4330 - DNA, 23 bp, Artificial sequence
  Primer
ggagactcgggcccgagtctccg

SEQ ID NO: 4331 - DNA, 23 bp, Artificial sequence
  Primer
tgcgactcgggcccgagtcgcag

SEQ ID NO: 4332 - DNA, 23 bp, Artificial sequence
  Primer
ggtgactcgggcccgagtcaccg

SEQ ID NO: 4333 - DNA, 23 bp, Artificial sequence
  Primer
acggactcgggcccgagtccgtg

SEQ ID NO: 4334 - DNA, 23 bp, Artificial sequence
  Primer
ccagactcgggcccgagtctggg

SEQ ID NO: 4335 - DNA, 23 bp, Artificial sequence
  Primer
tcggactcgggcccgagtccgag

SEQ ID NO: 4336 - DNA, 23 bp, Artificial sequence
  Primer
cctgactcgggcccgagtcaggg

SEQ ID NO: 4337 - DNA, 23 bp, Artificial sequence
  Primer
cacgactcgggcccgagtcgtgg

SEQ ID NO: 4338 - DNA, 23 bp, Artificial sequence
  Primer
gccgactcgggcccgagtcggct

SEQ ID NO: 4339 - DNA, 23 bp, Artificial sequence
  Primer
gccgactcgggcccgagtcggca

SEQ ID NO: 4340 - DNA, 23 bp, Artificial sequence
  Primer
cgagactcgggcccgagtctcgc

SEQ ID NO: 4341 - DNA, 23 bp, Artificial sequence
  Primer
cgtgactcgggcccgagtcacgc

SEQ ID NO: 4342 - DNA, 23 bp, Artificial sequence
  Primer
caggactcgggcccgagtcctgc

SEQ ID NO: 4343 - DNA, 23 bp, Artificial sequence
  Primer
ctggactcgggcccgagtccagc

SEQ ID NO: 4344 - DNA, 23 bp, Artificial sequence
  Primer
gaggactcgggcccgagtcctcg

SEQ ID NO: 4345 - DNA, 23 bp, Artificial sequence
  Primer
gtggactcgggcccgagtccacg

SEQ ID NO: 4346 - DNA, 23 bp, Artificial sequence
  Primer
accgactcgggcccgagtcggtg

SEQ ID NO: 4347 - DNA, 23 bp, Artificial sequence
  Primer
tccgactcgggcccgagtcggag

SEQ ID NO: 4348 - DNA, 23 bp, Artificial sequence
  Primer
cgggactcgggcccgagtcccgc

SEQ ID NO: 4349 - DNA, 23 bp, Artificial sequence
  Primer
agggactcgggcccgagtccctc

SEQ ID NO: 4350 - DNA, 23 bp, Artificial sequence
  Primer
tgggactcgggcccgagtcccac

SEQ ID NO: 4351 - DNA, 23 bp, Artificial sequence
  Primer
  misc_feature (1)..(3): n is a, c, g, or t
  misc_feature (20)..(23): n is a, c, g, or t
nnngactcggcgccgagtcnnnn

SEQ ID NO: 4352 - DNA, 23 bp, Artificial sequence
  Primer
gcggactcggcgccgagtccgcc

SEQ ID NO: 4353 - DNA, 23 bp, Artificial sequence
  Primer
gcggactcggcgccgagtccgct

SEQ ID NO: 4354 - DNA, 23 bp, Artificial sequence
  Primer
acggactcggcgccgagtccgtc

SEQ ID NO: 4355 - DNA, 23 bp, Artificial sequence
  Primer
gaggactcggcgccgagtcctcc

SEQ ID NO: 4356 - DNA, 23 bp, Artificial sequence
  Primer
gcagactcggcgccgagtctgcc

SEQ ID NO: 4357 - DNA, 23 bp, Artificial sequence
  Primer
gcggactcggcgccgagtccgca

SEQ ID NO: 4358 - DNA, 23 bp, Artificial sequence
  Primer
tcggactcggcgccgagtccgac

SEQ ID NO: 4359 - DNA, 23 bp, Artificial sequence
  Primer
gtggactcggcgccgagtccacc

SEQ ID NO: 4360 - DNA, 23 bp, Artificial sequence
  Primer
gctgactcggcgccgagtcagcc

SEQ ID NO: 4361 - DNA, 23 bp, Artificial sequence
  Primer
cccgactcggcgccgagtcgggc

SEQ ID NO: 4362 - DNA, 23 bp, Artificial sequence
  Primer
cccgactcggcgccgagtcgggt

SEQ ID NO: 4363 - DNA, 23 bp, Artificial sequence
  Primer
accgactcggcgccgagtcggtc

SEQ ID NO: 4364 - DNA, 23 bp, Artificial sequence
  Primer
cacgactcggcgccgagtcgtgc

SEQ ID NO: 4365 - DNA, 23 bp, Artificial sequence
  Primer
ccagactcggcgccgagtctggc

SEQ ID NO: 4366 - DNA, 23 bp, Artificial sequence
  Primer
cccgactcggcgccgagtcggga

SEQ ID NO: 4367 - DNA, 23 bp, Artificial sequence
  Primer
tccgactcggcgccgagtcggac

SEQ ID NO: 4368 - DNA, 23 bp, Artificial sequence
  Primer
cctgactcggcgccgagtcaggc

SEQ ID NO: 4369 - DNA, 23 bp, Artificial sequence
  Primer
ggcgactcggcgccgagtcgccc

SEQ ID NO: 4370 - DNA, 23 bp, Artificial sequence
  Primer
ggcgactcggcgccgagtcgcct

SEQ ID NO: 4371 - DNA, 23 bp, Artificial sequence
  Primer
agcgactcggcgccgagtcgctc

SEQ ID NO: 4372 - DNA, 23 bp, Artificial sequence
  Primer
gacgactcggcgccgagtcgtcc

SEQ ID NO: 4373 - DNA, 23 bp, Artificial sequence
  Primer
ggagactcggcgccgagtctccc

SEQ ID NO: 4374 - DNA, 23 bp, Artificial sequence
  Primer
ggcgactcggcgccgagtcgcca

SEQ ID NO: 4375 - DNA, 23 bp, Artificial sequence
  Primer
tgcgactcggcgccgagtcgcac

SEQ ID NO: 4376 - DNA, 23 bp, Artificial sequence
  Primer
ggtgactcggcgccgagtcaccc

SEQ ID NO: 4377 - DNA, 23 bp, Artificial sequence
  Primer
cgggactcggcgccgagtcccgt

SEQ ID NO: 4378 - DNA, 23 bp, Artificial sequence
  Primer
agggactcggcgccgagtccctg

SEQ ID NO: 4379 - DNA, 23 bp, Artificial sequence
  Primer
caggactcggcgccgagtcctgg

SEQ ID NO: 4380 - DNA, 23 bp, Artificial sequence
  Primer
cgagactcggcgccgagtctcgg

SEQ ID NO: 4381 - DNA, 23 bp, Artificial sequence
  Primer
cgggactcggcgccgagtcccga

SEQ ID NO: 4382 - DNA, 23 bp, Artificial sequence
  Primer
tgggactcggcgccgagtcccag

SEQ ID NO: 4383 - DNA, 23 bp, Artificial sequence
  Primer
ctggactcggcgccgagtccagg

SEQ ID NO: 4384 - DNA, 23 bp, Artificial sequence
  Primer
cgtgactcggcgccgagtcacgg

SEQ ID NO: 4385 - DNA, 23 bp, Artificial sequence
  Primer
ggcgactcggcgccgagtcgccg

SEQ ID NO: 4386 - DNA, 23 bp, Artificial sequence
  Primer
agcgactcggcgccgagtcgctg

SEQ ID NO: 4387 - DNA, 23 bp, Artificial sequence
  Primer
gacgactcggcgccgagtcgtcg

SEQ ID NO: 4388 - DNA, 23 bp, Artificial sequence
  Primer
ggagactcggcgccgagtctccg

SEQ ID NO: 4389 - DNA, 23 bp, Artificial sequence
  Primer
tgcgactcggcgccgagtcgcag

SEQ ID NO: 4390 - DNA, 23 bp, Artificial sequence
  Primer
ggtgactcggcgccgagtcaccg

SEQ ID NO: 4391 - DNA, 23 bp, Artificial sequence
  Primer
acggactcggcgccgagtccgtg

SEQ ID NO: 4392 - DNA, 23 bp, Artificial sequence
  Primer
ccagactcggcgccgagtctggg

SEQ ID NO: 4393 - DNA, 23 bp, Artificial sequence
  Primer
tcggactcggcgccgagtccgag

SEQ ID NO: 4394 - DNA, 23 bp, Artificial sequence
  Primer
cctgactcggcgccgagtcaggg

SEQ ID NO: 4395 - DNA, 23 bp, Artificial sequence
  Primer
cacgactcggcgccgagtcgtgg

SEQ ID NO: 4396 - DNA, 23 bp, Artificial sequence
  Primer
gccgactcggcgccgagtcggct

SEQ ID NO: 4397 - DNA, 23 bp, Artificial sequence
  Primer
gccgactcggcgccgagtcggca

SEQ ID NO: 4398 - DNA, 23 bp, Artificial sequence
  Primer
cgagactcggcgccgagtctcgc

SEQ ID NO: 4399 - DNA, 23 bp, Artificial sequence
  Primer
cgtgactcggcgccgagtcacgc

SEQ ID NO: 4400 - DNA, 23 bp, Artificial sequence
  Primer
caggactcggcgccgagtcctgc

SEQ ID NO: 4401 - DNA, 23 bp, Artificial sequence
  Primer
ctggactcggcgccgagtccagc

SEQ ID NO: 4402 - DNA, 23 bp, Artificial sequence
  Primer
gaggactcggcgccgagtcctcg

SEQ ID NO: 4403 - DNA, 23 bp, Artificial sequence
  Primer
gtggactcggcgccgagtccacg

SEQ ID NO: 4404 - DNA, 23 bp, Artificial sequence
  Primer
accgactcggcgccgagtcggtg

SEQ ID NO: 4405 - DNA, 23 bp, Artificial sequence
  Primer
tccgactcggcgccgagtcggag

SEQ ID NO: 4406 - DNA, 23 bp, Artificial sequence
  Primer
cgggactcggcgccgagtcccgc

SEQ ID NO: 4407 - DNA, 23 bp, Artificial sequence
  Primer
agggactcggcgccgagtccctc

SEQ ID NO: 4408 - DNA, 23 bp, Artificial sequence
  Primer
tgggactcggcgccgagtcccac

SEQ ID NO: 4409 - DNA, 23 bp, Artificial sequence
  Primer
  misc_feature (1)..(3): n is a, c, g, or t
  misc_feature (20)..(23): n is a, c, g, or t
nnngactcccatgggagtcnnnn

SEQ ID NO: 4410 - DNA, 23 bp, Artificial sequence
  Primer
gcggactcccatgggagtccgcc

SEQ ID NO: 4411 - DNA, 23 bp, Artificial sequence
  Primer
gcggactcccatgggagtccgct

SEQ ID NO: 4412 - DNA, 23 bp, Artificial sequence
  Primer
acggactcccatgggagtccgtc

SEQ ID NO: 4413 - DNA, 23 bp, Artificial sequence
  Primer
gaggactcccatgggagtcctcc

SEQ ID NO: 4414 - DNA, 23 bp, Artificial sequence
  Primer
gcagactcccatgggagtctgcc

SEQ ID NO: 4415 - DNA, 23 bp, Artificial sequence
  Primer
gcggactcccatgggagtccgca

SEQ ID NO: 4416 - DNA, 23 bp, Artificial sequence
  Primer
tcggactcccatgggagtccgac

SEQ ID NO: 4417 - DNA, 23 bp, Artificial sequence
  Primer
gtggactcccatgggagtccacc

SEQ ID NO: 4418 - DNA, 23 bp, Artificial sequence
  Primer
gctgactcccatgggagtcagcc

SEQ ID NO: 4419 - DNA, 23 bp, Artificial sequence
  Primer
cccgactcccatgggagtcgggc

SEQ ID NO: 4420 - DNA, 23 bp, Artificial sequence
  Primer
cccgactcccatgggagtcgggt

SEQ ID NO: 4421 - DNA, 23 bp, Artificial sequence
  Primer
accgactcccatgggagtcggtc

SEQ ID NO: 4422 - DNA, 23 bp, Artificial sequence
  Primer
cacgactcccatgggagtcgtgc

SEQ ID NO: 4423 - DNA, 23 bp, Artificial sequence
  Primer
ccagactcccatgggagtctggc

SEQ ID NO: 4424 - DNA, 23 bp, Artificial sequence
  Primer
cccgactcccatgggagtcggga

SEQ ID NO: 4425 - DNA, 23 bp, Artificial sequence
  Primer
tccgactcccatgggagtcggac

SEQ ID NO: 4426 - DNA, 23 bp, Artificial sequence
  Primer
cctgactcccatgggagtcaggc

SEQ ID NO: 4427 - DNA, 23 bp, Artificial sequence
  Primer
ggcgactcccatgggagtcgccc

SEQ ID NO: 4428 - DNA, 23 bp, Artificial sequence
  Primer
ggcgactcccatgggagtcgcct

SEQ ID NO: 4429 - DNA, 23 bp, Artificial sequence
  Primer
agcgactcccatgggagtcgctc

SEQ ID NO: 4430 - DNA, 23 bp, Artificial sequence
  Primer
gacgactcccatgggagtcgtcc

SEQ ID NO: 4431 - DNA, 23 bp, Artificial sequence
  Primer
ggagactcccatgggagtctccc

SEQ ID NO: 4432 - DNA, 23 bp, Artificial sequence
  Primer
ggcgactcccatgggagtcgcca

SEQ ID NO: 4433 - DNA, 23 bp, Artificial sequence
  Primer
tgcgactcccatgggagtcgcac

SEQ ID NO: 4434 - DNA, 23 bp, Artificial sequence
  Primer
ggtgactcccatgggagtcaccc

SEQ ID NO: 4435 - DNA, 23 bp, Artificial sequence
  Primer
cgggactcccatgggagtcccgt

SEQ ID NO: 4436 - DNA, 23 bp, Artificial sequence
  Primer
agggactcccatgggagtccctg

SEQ ID NO: 4437 - DNA, 23 bp, Artificial sequence
  Primer
caggactcccatgggagtcctgg

SEQ ID NO: 4438 - DNA, 23 bp, Artificial sequence
  Primer
cgagactcccatgggagtctcgg

SEQ ID NO: 4439 - DNA, 23 bp, Artificial sequence
  Primer
cgggactcccatgggagtcccga

SEQ ID NO: 4440 - DNA, 23 bp, Artificial sequence
  Primer
tgggactcccatgggagtcccag

SEQ ID NO: 4441 - DNA, 23 bp, Artificial sequence
  Primer
ctggactcccatgggagtccagg

SEQ ID NO: 4442 - DNA, 23 bp, Artificial sequence
  Primer
cgtgactcccatgggagtcacgg

SEQ ID NO: 4443 - DNA, 23 bp, Artificial sequence
  Primer
ggcgactcccatgggagtcgccg

SEQ ID NO: 4444 - DNA, 23 bp, Artificial sequence
  Primer
agcgactcccatgggagtcgctg

SEQ ID NO: 4445 - DNA, 23 bp, Artificial sequence
  Primer
gacgactcccatgggagtcgtcg

SEQ ID NO: 4446 - DNA, 23 bp, Artificial sequence
  Primer
ggagactcccatgggagtctccg

SEQ ID NO: 4447 - DNA, 23 bp, Artificial sequence
  Primer
tgcgactcccatgggagtcgcag

SEQ ID NO: 4448 - DNA, 23 bp, Artificial sequence
  Primer
ggtgactcccatgggagtcaccg

SEQ ID NO: 4449 - DNA, 23 bp, Artificial sequence
  Primer
acggactcccatgggagtccgtg

SEQ ID NO: 4450 - DNA, 23 bp, Artificial sequence
  Primer
ccagactcccatgggagtctggg

SEQ ID NO: 4451 - DNA, 23 bp, Artificial sequence
  Primer
tcggactcccatgggagtccgag

SEQ ID NO: 4452 - DNA, 23 bp, Artificial sequence
  Primer
cctgactcccatgggagtcaggg

SEQ ID NO: 4453 - DNA, 23 bp, Artificial sequence
  Primer
cacgactcccatgggagtcgtgg

SEQ ID NO: 4454 - DNA, 23 bp, Artificial sequence
  Primer
gccgactcccatgggagtcggct

SEQ ID NO: 4455 - DNA, 23 bp, Artificial sequence
  Primer
gccgactcccatgggagtcggca

SEQ ID NO: 4456 - DNA, 23 bp, Artificial sequence
  Primer
cgagactcccatgggagtctcgc

SEQ ID NO: 4457 - DNA, 23 bp, Artificial sequence
  Primer
cgtgactcccatgggagtcacgc

SEQ ID NO: 4458 - DNA, 23 bp, Artificial sequence
  Primer
caggactcccatgggagtcctgc

SEQ ID NO: 4459 - DNA, 23 bp, Artificial sequence
  Primer
ctggactcccatgggagtccagc

SEQ ID NO: 4460 - DNA, 23 bp, Artificial sequence
  Primer
gaggactcccatgggagtcctcg

SEQ ID NO: 4461 - DNA, 23 bp, Artificial sequence
  Primer
gtggactcccatgggagtccacg

SEQ ID NO: 4462 - DNA, 23 bp, Artificial sequence
  Primer
accgactcccatgggagtcggtg

SEQ ID NO: 4463 - DNA, 23 bp, Artificial sequence
  Primer
tccgactcccatgggagtcggag

SEQ ID NO: 4464 - DNA, 23 bp, Artificial sequence
  Primer
cgggactcccatgggagtcccgc

SEQ ID NO: 4465 - DNA, 23 bp, Artificial sequence
  Primer
agggactcccatgggagtccctc

SEQ ID NO: 4466 - DNA, 23 bp, Artificial sequence
  Primer
tgggactcccatgggagtcccac

SEQ ID NO: 4467 - DNA, 23 bp, Artificial sequence
  Primer
  misc_feature (1)..(3): n is a, c, g, or t
  misc_feature (20)..(23): n is a, c, g, or t
nnngactccctagggagtcnnnn

SEQ ID NO: 4468 - DNA, 23 bp, Artificial sequence
  Primer
gcggactccctagggagtccgcc

SEQ ID NO: 4469 - DNA, 23 bp, Artificial sequence
  Primer
gcggactccctagggagtccgct

SEQ ID NO: 4470 - DNA, 23 bp, Artificial sequence
  Primer
acggactccctagggagtccgtc

SEQ ID NO: 4471 - DNA, 23 bp, Artificial sequence
  Primer
gaggactccctagggagtcctcc

SEQ ID NO: 4472 - DNA, 23 bp, Artificial sequence
  Primer
gcagactccctagggagtctgcc

SEQ ID NO: 4473 - DNA, 23 bp, Artificial sequence
  Primer
gcggactccctagggagtccgca

SEQ ID NO: 4474 - DNA, 23 bp, Artificial sequence
  Primer
tcggactccctagggagtccgac

SEQ ID NO: 4475 - DNA, 23 bp, Artificial sequence
  Primer
gtggactccctagggagtccacc

SEQ ID NO: 4476 - DNA, 23 bp, Artificial sequence
  Primer
gctgactccctagggagtcagcc

SEQ ID NO: 4477 - DNA, 23 bp, Artificial sequence
  Primer
cccgactccctagggagtcgggc

SEQ ID NO: 4478 - DNA, 23 bp, Artificial sequence
  Primer
cccgactccctagggagtcgggt

SEQ ID NO: 4479 - DNA, 23 bp, Artificial sequence
  Primer
accgactccctagggagtcggtc

SEQ ID NO: 4480 - DNA, 23 bp, Artificial sequence
  Primer
cacgactccctagggagtcgtgc

SEQ ID NO: 4481 - DNA, 23 bp, Artificial sequence
  Primer
ccagactccctagggagtctggc

SEQ ID NO: 4482 - DNA, 23 bp, Artificial sequence
  Primer
cccgactccctagggagtcggga

SEQ ID NO: 4483 - DNA, 23 bp, Artificial sequence
  Primer
tccgactccctagggagtcggac

SEQ ID NO: 4484 - DNA, 23 bp, Artificial sequence
  Primer
cctgactccctagggagtcaggc

SEQ ID NO: 4485 - DNA, 23 bp, Artificial sequence
  Primer
ggcgactccctagggagtcgccc

SEQ ID NO: 4486 - DNA, 23 bp, Artificial sequence
  Primer
ggcgactccctagggagtcgcct

SEQ ID NO: 4487 - DNA, 23 bp, Artificial sequence
  Primer
agcgactccctagggagtcgctc

SEQ ID NO: 4488 - DNA, 23 bp, Artificial sequence
  Primer
gacgactccctagggagtcgtcc

SEQ ID NO: 4489 - DNA, 23 bp, Artificial sequence
  Primer
ggagactccctagggagtctccc

SEQ ID NO: 4490 - DNA, 23 bp, Artificial sequence
  Primer
ggcgactccctagggagtcgcca

SEQ ID NO: 4491 - DNA, 23 bp, Artificial sequence
  Primer
tgcgactccctagggagtcgcac

SEQ ID NO: 4492 - DNA, 23 bp, Artificial sequence
  Primer
ggtgactccctagggagtcaccc

SEQ ID NO: 4493 - DNA, 23 bp, Artificial sequence
  Primer
cgggactccctagggagtcccgt

SEQ ID NO: 4494 - DNA, 23 bp, Artificial sequence
  Primer
agggactccctagggagtccctg

SEQ ID NO: 4495 - DNA, 23 bp, Artificial sequence
  Primer
caggactccctagggagtcctgg

SEQ ID NO: 4496 - DNA, 23 bp, Artificial sequence
  Primer
cgagactccctagggagtctcgg

SEQ ID NO: 4497 - DNA, 23 bp, Artificial sequence
  Primer
cgggactccctagggagtcccga

SEQ ID NO: 4498 - DNA, 23 bp, Artificial sequence
  Primer
tgggactccctagggagtcccag

SEQ ID NO: 4499 - DNA, 23 bp, Artificial sequence
  Primer
ctggactccctagggagtccagg

SEQ ID NO: 4500 - DNA, 23 bp, Artificial sequence
  Primer
cgtgactccctagggagtcacgg

SEQ ID NO: 4501 - DNA, 23 bp, Artificial sequence
  Primer
ggcgactccctagggagtcgccg

SEQ ID NO: 4502 - DNA, 23 bp, Artificial sequence
  Primer
agcgactccctagggagtcgctg

SEQ ID NO: 4503 - DNA, 23 bp, Artificial sequence
  Primer
gacgactccctagggagtcgtcg

SEQ ID NO: 4504 - DNA, 23 bp, Artificial sequence
  Primer
ggagactccctagggagtctccg

SEQ ID NO: 4505 - DNA, 23 bp, Artificial sequence
  Primer
tgcgactccctagggagtcgcag

SEQ ID NO: 4506 - DNA, 23 bp, Artificial sequence
  Primer
ggtgactccctagggagtcaccg

SEQ ID NO: 4507 - DNA, 23 bp, Artificial sequence
  Primer
acggactccctagggagtccgtg

SEQ ID NO: 4508 - DNA, 23 bp, Artificial sequence
  Primer
ccagactccctagggagtctggg

SEQ ID NO: 4509 - DNA, 23 bp, Artificial sequence
  Primer
tcggactccctagggagtccgag

SEQ ID NO: 4510 - DNA, 23 bp, Artificial sequence
  Primer
cctgactccctagggagtcaggg

SEQ ID NO: 4511 - DNA, 23 bp, Artificial sequence
  Primer
cacgactccctagggagtcgtgg

SEQ ID NO: 4512 - DNA, 23 bp, Artificial sequence
  Primer
gccgactccctagggagtcggct

SEQ ID NO: 4513 - DNA, 23 bp, Artificial sequence
  Primer
gccgactccctagggagtcggca

SEQ ID NO: 4514 - DNA, 23 bp, Artificial sequence
  Primer
cgagactccctagggagtctcgc

SEQ ID NO: 4515 - DNA, 23 bp, Artificial sequence
  Primer
cgtgactccctagggagtcacgc

SEQ ID NO: 4516 - DNA, 23 bp, Artificial sequence
  Primer
caggactccctagggagtcctgc

SEQ ID NO: 4517 - DNA, 23 bp, Artificial sequence
  Primer
ctggactccctagggagtccagc

SEQ ID NO: 4518 - DNA, 23 bp, Artificial sequence
  Primer
gaggactccctagggagtcctcg

SEQ ID NO: 4519 - DNA, 23 bp, Artificial sequence
  Primer
gtggactccctagggagtccacg

SEQ ID NO: 4520 - DNA, 23 bp, Artificial sequence
  Primer
accgactccctagggagtcggtg

SEQ ID NO: 4521 - DNA, 23 bp, Artificial sequence
  Primer
tccgactccctagggagtcggag

SEQ ID NO: 4522 - DNA, 23 bp, Artificial sequence
  Primer
cgggactccctagggagtcccgc

SEQ ID NO: 4523 - DNA, 23 bp, Artificial sequence
  Primer
agggactccctagggagtccctc

SEQ ID NO: 4524 - DNA, 23 bp, Artificial sequence
  Primer
tgggactccctagggagtcccac

SEQ ID NO: 4525 - DNA, 23 bp, Artificial sequence
  Primer
  misc_feature (1)..(3): n is a, c, g, or t
  misc_feature (20)..(23): n is a, c, g, or t
nnngactcccgcgggagtcnnnn

SEQ ID NO: 4526 - DNA, 23 bp, Artificial sequence
  Primer
gcggactcccgcgggagtccgcc

SEQ ID NO: 4527 - DNA, 23 bp, Artificial sequence
  Primer
gcggactcccgcgggagtccgct

SEQ ID NO: 4528 - DNA, 23 bp, Artificial sequence
  Primer
acggactcccgcgggagtccgtc

SEQ ID NO: 4529 - DNA, 23 bp, Artificial sequence
  Primer
gaggactcccgcgggagtcctcc

SEQ ID NO: 4530 - DNA, 23 bp, Artificial sequence
  Primer
gcagactcccgcgggagtctgcc

SEQ ID NO: 4531 - DNA, 23 bp, Artificial sequence
  Primer
gcggactcccgcgggagtccgca

SEQ ID NO: 4532 - DNA, 23 bp, Artificial sequence
  Primer
tcggactcccgcgggagtccgac

SEQ ID NO: 4533 - DNA, 23 bp, Artificial sequence
  Primer
gtggactcccgcgggagtccacc

SEQ ID NO: 4534 - DNA, 23 bp, Artificial sequence
  Primer
gctgactcccgcgggagtcagcc

SEQ ID NO: 4535 - DNA, 23 bp, Artificial sequence
  Primer
cccgactcccgcgggagtcgggc

SEQ ID NO: 4536 - DNA, 23 bp, Artificial sequence
  Primer
cccgactcccgcgggagtcgggt

SEQ ID NO: 4537 - DNA, 23 bp, Artificial sequence
  Primer
accgactcccgcgggagtcggtc

SEQ ID NO: 4538 - DNA, 23 bp, Artificial sequence
  Primer
cacgactcccgcgggagtcgtgc

SEQ ID NO: 4539 - DNA, 23 bp, Artificial sequence
  Primer
ccagactcccgcgggagtctggc

SEQ ID NO: 4540 - DNA, 23 bp, Artificial sequence
  Primer
cccgactcccgcgggagtcggga

SEQ ID NO: 4541 - DNA, 23 bp, Artificial sequence
  Primer
tccgactcccgcgggagtcggac

SEQ ID NO: 4542 - DNA, 23 bp, Artificial sequence
  Primer
cctgactcccgcgggagtcaggc

SEQ ID NO: 4543 - DNA, 23 bp, Artificial sequence
  Primer
ggcgactcccgcgggagtcgccc

SEQ ID NO: 4544 - DNA, 23 bp, Artificial sequence
  Primer
ggcgactcccgcgggagtcgcct

SEQ ID NO: 4545 - DNA, 23 bp, Artificial sequence
  Primer
agcgactcccgcgggagtcgctc

SEQ ID NO: 4546 - DNA, 23 bp, Artificial sequence
  Primer
gacgactcccgcgggagtcgtcc

SEQ ID NO: 4547 - DNA, 23 bp, Artificial sequence
  Primer
ggagactcccgcgggagtctccc

SEQ ID NO: 4548 - DNA, 23 bp, Artificial sequence
  Primer
ggcgactcccgcgggagtcgcca

SEQ ID NO: 4549 - DNA, 23 bp, Artificial sequence
  Primer
tgcgactcccgcgggagtcgcac

SEQ ID NO: 4550 - DNA, 23 bp, Artificial sequence
  Primer
ggtgactcccgcgggagtcaccc

SEQ ID NO: 4551 - DNA, 23 bp, Artificial sequence
  Primer
cgggactcccgcgggagtcccgt

SEQ ID NO: 4552 - DNA, 23 bp, Artificial sequence
  Primer
agggactcccgcgggagtccctg

SEQ ID NO: 4553 - DNA, 23 bp, Artificial sequence
  Primer
caggactcccgcgggagtcctgg

SEQ ID NO: 4554 - DNA, 23 bp, Artificial sequence
  Primer
cgagactcccgcgggagtctcgg

SEQ ID NO: 4555 - DNA, 23 bp, Artificial sequence
  Primer
cgggactcccgcgggagtcccga

SEQ ID NO: 4556 - DNA, 23 bp, Artificial sequence
  Primer
tgggactcccgcgggagtcccag

SEQ ID NO: 4557 - DNA, 23 bp, Artificial sequence
  Primer
ctggactcccgcgggagtccagg

SEQ ID NO: 4558 - DNA, 23 bp, Artificial sequence
  Primer
cgtgactcccgcgggagtcacgg

SEQ ID NO: 4559 - DNA, 23 bp, Artificial sequence
  Primer
ggcgactcccgcgggagtcgccg

SEQ ID NO: 4560 - DNA, 23 bp, Artificial sequence
  Primer
agcgactcccgcgggagtcgctg

SEQ ID NO: 4561 - DNA, 23 bp, Artificial sequence
  Primer
gacgactcccgcgggagtcgtcg

SEQ ID NO: 4562 - DNA, 23 bp, Artificial sequence
  Primer
ggagactcccgcgggagtctccg

SEQ ID NO: 4563 - DNA, 23 bp, Artificial sequence
  Primer
tgcgactcccgcgggagtcgcag

SEQ ID NO: 4564 - DNA, 23 bp, Artificial sequence
  Primer
ggtgactcccgcgggagtcaccg

SEQ ID NO: 4565 - DNA, 23 bp, Artificial sequence
  Primer
acggactcccgcgggagtccgtg

SEQ ID NO: 4566 - DNA, 23 bp, Artificial sequence
  Primer
ccagactcccgcgggagtctggg

SEQ ID NO: 4567 - DNA, 23 bp, Artificial sequence
  Primer
tcggactcccgcgggagtccgag

SEQ ID NO: 4568 - DNA, 23 bp, Artificial sequence
  Primer
cctgactcccgcgggagtcaggg

SEQ ID NO: 4569 - DNA, 23 bp, Artificial sequence
  Primer
cacgactcccgcgggagtcgtgg

SEQ ID NO: 4570 - DNA, 23 bp, Artificial sequence
  Primer
gccgactcccgcgggagtcggct

SEQ ID NO: 4571 - DNA, 23 bp, Artificial sequence
  Primer
gccgactcccgcgggagtcggca

SEQ ID NO: 4572 - DNA, 23 bp, Artificial sequence
  Primer
cgagactcccgcgggagtctcgc

SEQ ID NO: 4573 - DNA, 23 bp, Artificial sequence
  Primer
cgtgactcccgcgggagtcacgc

SEQ ID NO: 4574 - DNA, 23 bp, Artificial sequence
  Primer
caggactcccgcgggagtcctgc

SEQ ID NO: 4575 - DNA, 23 bp, Artificial sequence
  Primer
ctggactcccgcgggagtccagc

SEQ ID NO: 4576 - DNA, 23 bp, Artificial sequence
  Primer
gaggactcccgcgggagtcctcg

SEQ ID NO: 4577 - DNA, 23 bp, Artificial sequence
  Primer
gtggactcccgcgggagtccacg

SEQ ID NO: 4578 - DNA, 23 bp, Artificial sequence
  Primer
accgactcccgcgggagtcggtg

SEQ ID NO: 4579 - DNA, 23 bp, Artificial sequence
  Primer
tccgactcccgcgggagtcggag

SEQ ID NO: 4580 - DNA, 23 bp, Artificial sequence
  Primer
cgggactcccgcgggagtcccgc

SEQ ID NO: 4581 - DNA, 23 bp, Artificial sequence
  Primer
agggactcccgcgggagtccctc

SEQ ID NO: 4582 - DNA, 23 bp, Artificial sequence
  Primer
tgggactcccgcgggagtcccac

SEQ ID NO: 4583 - DNA, 23 bp, Artificial sequence
  Primer
  misc_feature (1)..(3): n is a, c, g, or t
  misc_feature (20)..(23): n is a, c, g, or t
nnngactccccggggagtcnnnn

SEQ ID NO: 4584 - DNA, 23 bp, Artificial sequence
  Primer
gcggactccccggggagtccgcc

SEQ ID NO: 4585 - DNA, 23 bp, Artificial sequence
  Primer
gcggactccccggggagtccgct

SEQ ID NO: 4586 - DNA, 23 bp, Artificial sequence
  Primer
acggactccccggggagtccgtc

SEQ ID NO: 4587 - DNA, 23 bp, Artificial sequence
  Primer
gaggactccccggggagtcctcc

SEQ ID NO: 4588 - DNA, 23 bp, Artificial sequence
  Primer
gcagactccccggggagtctgcc

SEQ ID NO: 4589 - DNA, 23 bp, Artificial sequence
  Primer
gcggactccccggggagtccgca

SEQ ID NO: 4590 - DNA, 23 bp, Artificial sequence
  Primer
tcggactccccggggagtccgac

SEQ ID NO: 4591 - DNA, 23 bp, Artificial sequence
  Primer
gtggactccccggggagtccacc

SEQ ID NO: 4592 - DNA, 23 bp, Artificial sequence
  Primer
gctgactccccggggagtcagcc

SEQ ID NO: 4593 - DNA, 23 bp, Artificial sequence
  Primer
cccgactccccggggagtcgggc

SEQ ID NO: 4594 - DNA, 23 bp, Artificial sequence
  Primer
cccgactccccggggagtcgggt

SEQ ID NO: 4595 - DNA, 23 bp, Artificial sequence
  Primer
accgactccccggggagtcggtc

SEQ ID NO: 4596 - DNA, 23 bp, Artificial sequence
  Primer
cacgactccccggggagtcgtgc

SEQ ID NO: 4597 - DNA, 23 bp, Artificial sequence
  Primer
ccagactccccggggagtctggc

SEQ ID NO: 4598 - DNA, 23 bp, Artificial sequence
  Primer
cccgactccccggggagtcggga

SEQ ID NO: 4599 - DNA, 23 bp, Artificial sequence
  Primer
tccgactccccggggagtcggac

SEQ ID NO: 4600 - DNA, 23 bp, Artificial sequence
  Primer
cctgactccccggggagtcaggc

SEQ ID NO: 4601 - DNA, 23 bp, Artificial sequence
  Primer
ggcgactccccggggagtcgccc

SEQ ID NO: 4602 - DNA, 23 bp, Artificial sequence
  Primer
ggcgactccccggggagtcgcct

SEQ ID NO: 4603 - DNA, 23 bp, Artificial sequence
  Primer
agcgactccccggggagtcgctc

SEQ ID NO: 4604 - DNA, 23 bp, Artificial sequence
  Primer
gacgactccccggggagtcgtcc

SEQ ID NO: 4605 - DNA, 23 bp, Artificial sequence
  Primer
ggagactccccggggagtctccc

SEQ ID NO: 4606 - DNA, 23 bp, Artificial sequence
  Primer
ggcgactccccggggagtcgcca

SEQ ID NO: 4607 - DNA, 23 bp, Artificial sequence
  Primer
tgcgactccccggggagtcgcac

SEQ ID NO: 4608 - DNA, 23 bp, Artificial sequence
  Primer
ggtgactccccggggagtcaccc

SEQ ID NO: 4609 - DNA, 23 bp, Artificial sequence
  Primer
cgggactccccggggagtcccgt

SEQ ID NO: 4610 - DNA, 23 bp, Artificial sequence
  Primer
agggactccccggggagtccctg

SEQ ID NO: 4611 - DNA, 23 bp, Artificial sequence
  Primer
caggactccccggggagtcctgg

SEQ ID NO: 4612 - DNA, 23 bp, Artificial sequence
  Primer
cgagactccccggggagtctcgg

SEQ ID NO: 4613 - DNA, 23 bp, Artificial sequence
  Primer
cgggactccccggggagtcccga

SEQ ID NO: 4614 - DNA, 23 bp, Artificial sequence
  Primer
tgggactccccggggagtcccag

SEQ ID NO: 4615 - DNA, 23 bp, Artificial sequence
  Primer
ctggactccccggggagtccagg

SEQ ID NO: 4616 - DNA, 23 bp, Artificial sequence
  Primer
cgtgactccccggggagtcacgg

SEQ ID NO: 4617 - DNA, 23 bp, Artificial sequence
  Primer
ggcgactccccggggagtcgccg

SEQ ID NO: 4618 - DNA, 23 bp, Artificial sequence
  Primer
agcgactccccggggagtcgctg

SEQ ID NO: 4619 - DNA, 23 bp, Artificial sequence
  Primer
gacgactccccggggagtcgtcg

SEQ ID NO: 4620 - DNA, 23 bp, Artificial sequence
  Primer
ggagactccccggggagtctccg

SEQ ID NO: 4621 - DNA, 23 bp, Artificial sequence
  Primer
tgcgactccccggggagtcgcag

SEQ ID NO: 4622 - DNA, 23 bp, Artificial sequence
  Primer
ggtgactccccggggagtcaccg

SEQ ID NO: 4623 - DNA, 23 bp, Artificial sequence
  Primer
acggactccccggggagtccgtg

SEQ ID NO: 4624 - DNA, 23 bp, Artificial sequence
  Primer
ccagactccccggggagtctggg

SEQ ID NO: 4625 - DNA, 23 bp, Artificial sequence
  Primer
tcggactccccggggagtccgag

SEQ ID NO: 4626 - DNA, 23 bp, Artificial sequence
  Primer
cctgactccccggggagtcaggg

SEQ ID NO: 4627 - DNA, 23 bp, Artificial sequence
  Primer
cacgactccccggggagtcgtgg

SEQ ID NO: 4628 - DNA, 23 bp, Artificial sequence
  Primer
gccgactccccggggagtcggct

SEQ ID NO: 4629 - DNA, 23 bp, Artificial sequence
  Primer
gccgactccccggggagtcggca

SEQ ID NO: 4630 - DNA, 23 bp, Artificial sequence
  Primer
cgagactccccggggagtctcgc

SEQ ID NO: 4631 - DNA, 23 bp, Artificial sequence
  Primer
cgtgactccccggggagtcacgc

SEQ ID NO: 4632 - DNA, 23 bp, Artificial sequence
  Primer
caggactccccggggagtcctgc

SEQ ID NO: 4633 - DNA, 23 bp, Artificial sequence
  Primer
ctggactccccggggagtccagc

SEQ ID NO: 4634 - DNA, 23 bp, Artificial sequence
  Primer
gaggactccccggggagtcctcg

SEQ ID NO: 4635 - DNA, 23 bp, Artificial sequence
  Primer
gtggactccccggggagtccacg

SEQ ID NO: 4636 - DNA, 23 bp, Artificial sequence
  Primer
accgactccccggggagtcggtg

SEQ ID NO: 4637 - DNA, 23 bp, Artificial sequence
  Primer
tccgactccccggggagtcggag

SEQ ID NO: 4638 - DNA, 23 bp, Artificial sequence
  Primer
cgggactccccggggagtcccgc

SEQ ID NO: 4639 - DNA, 23 bp, Artificial sequence
  Primer
agggactccccggggagtccctc

SEQ ID NO: 4640 - DNA, 23 bp, Artificial sequence
  Primer
tgggactccccggggagtcccac

SEQ ID NO: 4641 - DNA, 23 bp, Artificial sequence
  Primer
  misc_feature (1)..(3): n is a, c, g, or t
  misc_feature (20)..(23): n is a, c, g, or t
nnngactcgtatacgagtcnnnn

SEQ ID NO: 4642 - DNA, 23 bp, Artificial sequence
  Primer
gcggactcgtatacgagtccgcc

SEQ ID NO: 4643 - DNA, 23 bp, Artificial sequence
  Primer
gcggactcgtatacgagtccgct

SEQ ID NO: 4644 - DNA, 23 bp, Artificial sequence
  Primer
acggactcgtatacgagtccgtc

SEQ ID NO: 4645 - DNA, 23 bp, Artificial sequence
  Primer
gaggactcgtatacgagtcctcc

SEQ ID NO: 4646 - DNA, 23 bp, Artificial sequence
  Primer
gcagactcgtatacgagtctgcc

SEQ ID NO: 4647 - DNA, 23 bp, Artificial sequence
  Primer
gcggactcgtatacgagtccgca

SEQ ID NO: 4648 - DNA, 23 bp, Artificial sequence
  Primer
tcggactcgtatacgagtccgac

SEQ ID NO: 4649 - DNA, 23 bp, Artificial sequence
  Primer
gtggactcgtatacgagtccacc

SEQ ID NO: 4650 - DNA, 23 bp, Artificial sequence
  Primer
gctgactcgtatacgagtcagcc

SEQ ID NO: 4651 - DNA, 23 bp, Artificial sequence
  Primer
cccgactcgtatacgagtcgggc

SEQ ID NO: 4652 - DNA, 23 bp, Artificial sequence
  Primer
cccgactcgtatacgagtcgggt

SEQ ID NO: 4653 - DNA, 23 bp, Artificial sequence
  Primer
accgactcgtatacgagtcggtc

SEQ ID NO: 4654 - DNA, 23 bp, Artificial sequence
  Primer
cacgactcgtatacgagtcgtgc

SEQ ID NO: 4655 - DNA, 23 bp, Artificial sequence
  Primer
ccagactcgtatacgagtctggc

SEQ ID NO: 4656 - DNA, 23 bp, Artificial sequence
  Primer
cccgactcgtatacgagtcggga

SEQ ID NO: 4657 - DNA, 23 bp, Artificial sequence
  Primer
tccgactcgtatacgagtcggac

SEQ ID NO: 4658 - DNA, 23 bp, Artificial sequence
  Primer
cctgactcgtatacgagtcaggc

SEQ ID NO: 4659 - DNA, 23 bp, Artificial sequence
  Primer
ggcgactcgtatacgagtcgccc

SEQ ID NO: 4660 - DNA, 23 bp, Artificial sequence
  Primer
ggcgactcgtatacgagtcgcct

SEQ ID NO: 4661 - DNA, 23 bp, Artificial sequence
  Primer
agcgactcgtatacgagtcgctc

SEQ ID NO: 4662 - DNA, 23 bp, Artificial sequence
  Primer
gacgactcgtatacgagtcgtcc

SEQ ID NO: 4663 - DNA, 23 bp, Artificial sequence
  Primer
ggagactcgtatacgagtctccc

SEQ ID NO: 4664 - DNA, 23 bp, Artificial sequence
  Primer
ggcgactcgtatacgagtcgcca

SEQ ID NO: 4665 - DNA, 23 bp, Artificial sequence
  Primer
tgcgactcgtatacgagtcgcac

SEQ ID NO: 4666 - DNA, 23 bp, Artificial sequence
  Primer
ggtgactcgtatacgagtcaccc

SEQ ID NO: 4667 - DNA, 23 bp, Artificial sequence
  Primer
cgggactcgtatacgagtcccgt

SEQ ID NO: 4668 - DNA, 23 bp, Artificial sequence
  Primer
agggactcgtatacgagtccctg

SEQ ID NO: 4669 - DNA, 23 bp, Artificial sequence
  Primer
caggactcgtatacgagtcctgg

SEQ ID NO: 4670 - DNA, 23 bp, Artificial sequence
  Primer
cgagactcgtatacgagtctcgg

SEQ ID NO: 4671 - DNA, 23 bp, Artificial sequence
  Primer
cgggactcgtatacgagtcccga

SEQ ID NO: 4672 - DNA, 23 bp, Artificial sequence
  Primer
tgggactcgtatacgagtcccag

SEQ ID NO: 4673 - DNA, 23 bp, Artificial sequence
  Primer
ctggactcgtatacgagtccagg

SEQ ID NO: 4674 - DNA, 23 bp, Artificial sequence
  Primer
cgtgactcgtatacgagtcacgg

SEQ ID NO: 4675 - DNA, 23 bp, Artificial sequence
  Primer
ggcgactcgtatacgagtcgccg

SEQ ID NO: 4676 - DNA, 23 bp, Artificial sequence
  Primer
agcgactcgtatacgagtcgctg

SEQ ID NO: 4677 - DNA, 23 bp, Artificial sequence
  Primer
gacgactcgtatacgagtcgtcg

SEQ ID NO: 4678 - DNA, 23 bp, Artificial sequence
  Primer
ggagactcgtatacgagtctccg

SEQ ID NO: 4679 - DNA, 23 bp, Artificial sequence
  Primer
tgcgactcgtatacgagtcgcag

SEQ ID NO: 4680 - DNA, 23 bp, Artificial sequence
  Primer
ggtgactcgtatacgagtcaccg

SEQ ID NO: 4681 - DNA, 23 bp, Artificial sequence
  Primer
acggactcgtatacgagtccgtg

SEQ ID NO: 4682 - DNA, 23 bp, Artificial sequence
  Primer
ccagactcgtatacgagtctggg

SEQ ID NO: 4683 - DNA, 23 bp, Artificial sequence
  Primer
tcggactcgtatacgagtccgag

SEQ ID NO: 4684 - DNA, 23 bp, Artificial sequence
  Primer
cctgactcgtatacgagtcaggg

SEQ ID NO: 4685 - DNA, 23 bp, Artificial sequence
  Primer
cacgactcgtatacgagtcgtgg

SEQ ID NO: 4686 - DNA, 23 bp, Artificial sequence
  Primer
gccgactcgtatacgagtcggct

SEQ ID NO: 4687 - DNA, 23 bp, Artificial sequence
  Primer
gccgactcgtatacgagtcggca

SEQ ID NO: 4688 - DNA, 23 bp, Artificial sequence
  Primer
cgagactcgtatacgagtctcgc

SEQ ID NO: 4689 - DNA, 23 bp, Artificial sequence
  Primer
cgtgactcgtatacgagtcacgc

SEQ ID NO: 4690 - DNA, 23 bp, Artificial sequence
  Primer
caggactcgtatacgagtcctgc

SEQ ID NO: 4691 - DNA, 23 bp, Artificial sequence
  Primer
ctggactcgtatacgagtccagc

SEQ ID NO: 4692 - DNA, 23 bp, Artificial sequence
  Primer
gaggactcgtatacgagtcctcg

SEQ ID NO: 4693 - DNA, 23 bp, Artificial sequence
  Primer
gtggactcgtatacgagtccacg

SEQ ID NO: 4694 - DNA, 23 bp, Artificial sequence
  Primer
accgactcgtatacgagtcggtg

SEQ ID NO: 4695 - DNA, 23 bp, Artificial sequence
  Primer
tccgactcgtatacgagtcggag

SEQ ID NO: 4696 - DNA, 23 bp, Artificial sequence
  Primer
cgggactcgtatacgagtcccgc

SEQ ID NO: 4697 - DNA, 23 bp, Artificial sequence
  Primer
agggactcgtatacgagtccctc

SEQ ID NO: 4698 - DNA, 23 bp, Artificial sequence
  Primer
tgggactcgtatacgagtcccac

SEQ ID NO: 4699 - DNA, 23 bp, Artificial sequence
  Primer
  misc_feature (1)..(3): n is a, c, g, or t
  misc_feature (20)..(23): n is a, c, g, or t
nnngactcgttaacgagtcnnnn

SEQ ID NO: 4700 - DNA, 23 bp, Artificial sequence
  Primer
gcggactcgttaacgagtccgcc

SEQ ID NO: 4701 - DNA, 23 bp, Artificial sequence
  Primer
gcggactcgttaacgagtccgct

SEQ ID NO: 4702 - DNA, 23 bp, Artificial sequence
  Primer
acggactcgttaacgagtccgtc

SEQ ID NO: 4703 - DNA, 23 bp, Artificial sequence
  Primer
gaggactcgttaacgagtcctcc

SEQ ID NO: 4704 - DNA, 23 bp, Artificial sequence
  Primer
gcagactcgttaacgagtctgcc

SEQ ID NO: 4705 - DNA, 23 bp, Artificial sequence
  Primer
gcggactcgttaacgagtccgca

SEQ ID NO: 4706 - DNA, 23 bp, Artificial sequence
  Primer
tcggactcgttaacgagtccgac

SEQ ID NO: 4707 - DNA, 23 bp, Artificial sequence
  Primer
gtggactcgttaacgagtccacc

SEQ ID NO: 4708 - DNA, 23 bp, Artificial sequence
  Primer
gctgactcgttaacgagtcagcc

SEQ ID NO: 4709 - DNA, 23 bp, Artificial sequence
  Primer
cccgactcgttaacgagtcgggc

SEQ ID NO: 4710 - DNA, 23 bp, Artificial sequence
  Primer
cccgactcgttaacgagtcgggt

SEQ ID NO: 4711 - DNA, 23 bp, Artificial sequence
  Primer
accgactcgttaacgagtcggtc

SEQ ID NO: 4712 - DNA, 23 bp, Artificial sequence
  Primer
cacgactcgttaacgagtcgtgc

SEQ ID NO: 4713 - DNA, 23 bp, Artificial sequence
  Primer
ccagactcgttaacgagtctggc

SEQ ID NO: 4714 - DNA, 23 bp, Artificial sequence
  Primer
cccgactcgttaacgagtcggga

SEQ ID NO: 4715 - DNA, 23 bp, Artificial sequence
  Primer
tccgactcgttaacgagtcggac

SEQ ID NO: 4716 - DNA, 23 bp, Artificial sequence
  Primer
cctgactcgttaacgagtcaggc

SEQ ID NO: 4717 - DNA, 23 bp, Artificial sequence
  Primer
ggcgactcgttaacgagtcgccc

SEQ ID NO: 4718 - DNA, 23 bp, Artificial sequence
  Primer
ggcgactcgttaacgagtcgcct

SEQ ID NO: 4719 - DNA, 23 bp, Artificial sequence
  Primer
agcgactcgttaacgagtcgctc

SEQ ID NO: 4720 - DNA, 23 bp, Artificial sequence
  Primer
gacgactcgttaacgagtcgtcc

SEQ ID NO: 4721 - DNA, 23 bp, Artificial sequence
  Primer
ggagactcgttaacgagtctccc

SEQ ID NO: 4722 - DNA, 23 bp, Artificial sequence
  Primer
ggcgactcgttaacgagtcgcca

SEQ ID NO: 4723 - DNA, 23 bp, Artificial sequence
  Primer
tgcgactcgttaacgagtcgcac

SEQ ID NO: 4724 - DNA, 23 bp, Artificial sequence
  Primer
ggtgactcgttaacgagtcaccc

SEQ ID NO: 4725 - DNA, 23 bp, Artificial sequence
  Primer
cgggactcgttaacgagtcccgt

SEQ ID NO: 4726 - DNA, 23 bp, Artificial sequence
  Primer
agggactcgttaacgagtccctg

SEQ ID NO: 4727 - DNA, 23 bp, Artificial sequence
  Primer
caggactcgttaacgagtcctgg

SEQ ID NO: 4728 - DNA, 23 bp, Artificial sequence
  Primer
cgagactcgttaacgagtctcgg

SEQ ID NO: 4729 - DNA, 23 bp, Artificial sequence
  Primer
cgggactcgttaacgagtcccga

SEQ ID NO: 4730 - DNA, 23 bp, Artificial sequence
  Primer
tgggactcgttaacgagtcccag

SEQ ID NO: 4731 - DNA, 23 bp, Artificial sequence
  Primer
ctggactcgttaacgagtccagg

SEQ ID NO: 4732 - DNA, 23 bp, Artificial sequence
  Primer
cgtgactcgttaacgagtcacgg

SEQ ID NO: 4733 - DNA, 23 bp, Artificial sequence
  Primer
ggcgactcgttaacgagtcgccg

SEQ ID NO: 4734 - DNA, 23 bp, Artificial sequence
  Primer
agcgactcgttaacgagtcgctg

SEQ ID NO: 4735 - DNA, 23 bp, Artificial sequence
  Primer
gacgactcgttaacgagtcgtcg

SEQ ID NO: 4736 - DNA, 23 bp, Artificial sequence
  Primer
ggagactcgttaacgagtctccg

SEQ ID NO: 4737 - DNA, 23 bp, Artificial sequence
  Primer
tgcgactcgttaacgagtcgcag

SEQ ID NO: 4738 - DNA, 23 bp, Artificial sequence
  Primer
ggtgactcgttaacgagtcaccg

SEQ ID NO: 4739 - DNA, 23 bp, Artificial sequence
  Primer
acggactcgttaacgagtccgtg

SEQ ID NO: 4740 - DNA, 23 bp, Artificial sequence
  Primer
ccagactcgttaacgagtctggg

SEQ ID NO: 4741 - DNA, 23 bp, Artificial sequence
  Primer
tcggactcgttaacgagtccgag

SEQ ID NO: 4742 - DNA, 23 bp, Artificial sequence
  Primer
cctgactcgttaacgagtcaggg

SEQ ID NO: 4743 - DNA, 23 bp, Artificial sequence
  Primer
cacgactcgttaacgagtcgtgg

SEQ ID NO: 4744 - DNA, 23 bp, Artificial sequence
  Primer
gccgactcgttaacgagtcggct

SEQ ID NO: 4745 - DNA, 23 bp, Artificial sequence
  Primer
gccgactcgttaacgagtcggca

SEQ ID NO: 4746 - DNA, 23 bp, Artificial sequence
  Primer
cgagactcgttaacgagtctcgc

SEQ ID NO: 4747 - DNA, 23 bp, Artificial sequence
  Primer
cgtgactcgttaacgagtcacgc

SEQ ID NO: 4748 - DNA, 23 bp, Artificial sequence
  Primer
caggactcgttaacgagtcctgc

SEQ ID NO: 4749 - DNA, 23 bp, Artificial sequence
  Primer
ctggactcgttaacgagtccagc

SEQ ID NO: 4750 - DNA, 23 bp, Artificial sequence
  Primer
gaggactcgttaacgagtcctcg

SEQ ID NO: 4751 - DNA, 23 bp, Artificial sequence
  Primer
gtggactcgttaacgagtccacg

SEQ ID NO: 4752 - DNA, 23 bp, Artificial sequence
  Primer
accgactcgttaacgagtcggtg

SEQ ID NO: 4753 - DNA, 23 bp, Artificial sequence
  Primer
tccgactcgttaacgagtcggag

SEQ ID NO: 4754 - DNA, 23 bp, Artificial sequence
  Primer
cgggactcgttaacgagtcccgc

SEQ ID NO: 4755 - DNA, 23 bp, Artificial sequence
  Primer
agggactcgttaacgagtccctc

SEQ ID NO: 4756 - DNA, 23 bp, Artificial sequence
  Primer
tgggactcgttaacgagtcccac

SEQ ID NO: 4757 - DNA, 23 bp, Artificial sequence
  Primer
  misc_feature (1)..(3): n is a, c, g, or t
  misc_feature (20)..(23): n is a, c, g, or t
nnngactcgtgcacgagtcnnnn

SEQ ID NO: 4758 - DNA, 23 bp, Artificial sequence
  Primer
gcggactcgtgcacgagtccgcc

SEQ ID NO: 4759 - DNA, 23 bp, Artificial sequence
  Primer
gcggactcgtgcacgagtccgct

SEQ ID NO: 4760 - DNA, 23 bp, Artificial sequence
  Primer
acggactcgtgcacgagtccgtc

SEQ ID NO: 4761 - DNA, 23 bp, Artificial sequence
  Primer
gaggactcgtgcacgagtcctcc

SEQ ID NO: 4762 - DNA, 23 bp, Artificial sequence
  Primer
gcagactcgtgcacgagtctgcc

SEQ ID NO: 4763 - DNA, 23 bp, Artificial sequence
  Primer
gcggactcgtgcacgagtccgca

SEQ ID NO: 4764 - DNA, 23 bp, Artificial sequence
  Primer
tcggactcgtgcacgagtccgac

SEQ ID NO: 4765 - DNA, 23 bp, Artificial sequence
  Primer
gtggactcgtgcacgagtccacc

SEQ ID NO: 4766 - DNA, 23 bp, Artificial sequence
  Primer
gctgactcgtgcacgagtcagcc

SEQ ID NO: 4767 - DNA, 23 bp, Artificial sequence
  Primer
cccgactcgtgcacgagtcgggc

SEQ ID NO: 4768 - DNA, 23 bp, Artificial sequence
  Primer
cccgactcgtgcacgagtcgggt

SEQ ID NO: 4769 - DNA, 23 bp, Artificial sequence
  Primer
accgactcgtgcacgagtcggtc

SEQ ID NO: 4770 - DNA, 23 bp, Artificial sequence
  Primer
cacgactcgtgcacgagtcgtgc

SEQ ID NO: 4771 - DNA, 23 bp, Artificial sequence
  Primer
ccagactcgtgcacgagtctggc

SEQ ID NO: 4772 - DNA, 23 bp, Artificial sequence
  Primer
cccgactcgtgcacgagtcggga

SEQ ID NO: 4773 - DNA, 23 bp, Artificial sequence
  Primer
tccgactcgtgcacgagtcggac

SEQ ID NO: 4774 - DNA, 23 bp, Artificial sequence
  Primer
cctgactcgtgcacgagtcaggc

SEQ ID NO: 4775 - DNA, 23 bp, Artificial sequence
  Primer
ggcgactcgtgcacgagtcgccc

SEQ ID NO: 4776 - DNA, 23 bp, Artificial sequence
  Primer
ggcgactcgtgcacgagtcgcct

SEQ ID NO: 4777 - DNA, 23 bp, Artificial sequence
  Primer
agcgactcgtgcacgagtcgctc

SEQ ID NO: 4778 - DNA, 23 bp, Artificial sequence
  Primer
gacgactcgtgcacgagtcgtcc

SEQ ID NO: 4779 - DNA, 23 bp, Artificial sequence
  Primer
ggagactcgtgcacgagtctccc

SEQ ID NO: 4780 - DNA, 23 bp, Artificial sequence
  Primer
ggcgactcgtgcacgagtcgcca

SEQ ID NO: 4781 - DNA, 23 bp, Artificial sequence
  Primer
tgcgactcgtgcacgagtcgcac

SEQ ID NO: 4782 - DNA, 23 bp, Artificial sequence
  Primer
ggtgactcgtgcacgagtcaccc

SEQ ID NO: 4783 - DNA, 23 bp, Artificial sequence
  Primer
cgggactcgtgcacgagtcccgt

SEQ ID NO: 4784 - DNA, 23 bp, Artificial sequence
  Primer
agggactcgtgcacgagtccctg

SEQ ID NO: 4785 - DNA, 23 bp, Artificial sequence
  Primer
caggactcgtgcacgagtcctgg

SEQ ID NO: 4786 - DNA, 23 bp, Artificial sequence
  Primer
cgagactcgtgcacgagtctcgg

SEQ ID NO: 4787 - DNA, 23 bp, Artificial sequence
  Primer
cgggactcgtgcacgagtcccga

SEQ ID NO: 4788 - DNA, 23 bp, Artificial sequence
  Primer
tgggactcgtgcacgagtcccag

SEQ ID NO: 4789 - DNA, 23 bp, Artificial sequence
  Primer
ctggactcgtgcacgagtccagg

SEQ ID NO: 4790 - DNA, 23 bp, Artificial sequence
  Primer
cgtgactcgtgcacgagtcacgg

SEQ ID NO: 4791 - DNA, 23 bp, Artificial sequence
  Primer
ggcgactcgtgcacgagtcgccg

SEQ ID NO: 4792 - DNA, 23 bp, Artificial sequence
  Primer
agcgactcgtgcacgagtcgctg

SEQ ID NO: 4793 - DNA, 23 bp, Artificial sequence
  Primer
gacgactcgtgcacgagtcgtcg

SEQ ID NO: 4794 - DNA, 23 bp, Artificial sequence
  Primer
ggagactcgtgcacgagtctccg

SEQ ID NO: 4795 - DNA, 23 bp, Artificial sequence
  Primer
tgcgactcgtgcacgagtcgcag

SEQ ID NO: 4796 - DNA, 23 bp, Artificial sequence
  Primer
ggtgactcgtgcacgagtcaccg

SEQ ID NO: 4797 - DNA, 23 bp, Artificial sequence
  Primer
acggactcgtgcacgagtccgtg

SEQ ID NO: 4798 - DNA, 23 bp, Artificial sequence
  Primer
ccagactcgtgcacgagtctggg

SEQ ID NO: 4799 - DNA, 23 bp, Artificial sequence
  Primer
tcggactcgtgcacgagtccgag

SEQ ID NO: 4800 - DNA, 23 bp, Artificial sequence
  Primer
cctgactcgtgcacgagtcaggg

SEQ ID NO: 4801 - DNA, 23 bp, Artificial sequence
  Primer
cacgactcgtgcacgagtcgtgg

SEQ ID NO: 4802 - DNA, 23 bp, Artificial sequence
  Primer
gccgactcgtgcacgagtcggct

SEQ ID NO: 4803 - DNA, 23 bp, Artificial sequence
  Primer
gccgactcgtgcacgagtcggca

SEQ ID NO: 4804 - DNA, 23 bp, Artificial sequence
  Primer
cgagactcgtgcacgagtctcgc

SEQ ID NO: 4805 - DNA, 23 bp, Artificial sequence
  Primer
cgtgactcgtgcacgagtcacgc

SEQ ID NO: 4806 - DNA, 23 bp, Artificial sequence
  Primer
caggactcgtgcacgagtcctgc

SEQ ID NO: 4807 - DNA, 23 bp, Artificial sequence
  Primer
ctggactcgtgcacgagtccagc

SEQ ID NO: 4808 - DNA, 23 bp, Artificial sequence
  Primer
gaggactcgtgcacgagtcctcg

SEQ ID NO: 4809 - DNA, 23 bp, Artificial sequence
  Primer
gtggactcgtgcacgagtccacg

SEQ ID NO: 4810 - DNA, 23 bp, Artificial sequence
  Primer
accgactcgtgcacgagtcggtg

SEQ ID NO: 4811 - DNA, 23 bp, Artificial sequence
  Primer
tccgactcgtgcacgagtcggag

SEQ ID NO: 4812 - DNA, 23 bp, Artificial sequence
  Primer
cgggactcgtgcacgagtcccgc

SEQ ID NO: 4813 - DNA, 23 bp, Artificial sequence
  Primer
agggactcgtgcacgagtccctc

SEQ ID NO: 4814 - DNA, 23 bp, Artificial sequence
  Primer
tgggactcgtgcacgagtcccac

SEQ ID NO: 4815 - DNA, 23 bp, Artificial sequence
  Primer
  misc_feature (1)..(3): n is a, c, g, or t
  misc_feature (20)..(23): n is a, c, g, or t
nnngactcgtcgacgagtcnnnn

SEQ ID NO: 4816 - DNA, 23 bp, Artificial sequence
  Primer
gcggactcgtcgacgagtccgcc

SEQ ID NO: 4817 - DNA, 23 bp, Artificial sequence
  Primer
gcggactcgtcgacgagtccgct

SEQ ID NO: 4818 - DNA, 23 bp, Artificial sequence
  Primer
acggactcgtcgacgagtccgtc

SEQ ID NO: 4819 - DNA, 23 bp, Artificial sequence
  Primer
gaggactcgtcgacgagtcctcc

SEQ ID NO: 4820 - DNA, 23 bp, Artificial sequence
  Primer
gcagactcgtcgacgagtctgcc

SEQ ID NO: 4821 - DNA, 23 bp, Artificial sequence
  Primer
gcggactcgtcgacgagtccgca

SEQ ID NO: 4822 - DNA, 23 bp, Artificial sequence
  Primer
tcggactcgtcgacgagtccgac

SEQ ID NO: 4823 - DNA, 23 bp, Artificial sequence
  Primer
gtggactcgtcgacgagtccacc

SEQ ID NO: 4824 - DNA, 23 bp, Artificial sequence
  Primer
gctgactcgtcgacgagtcagcc

SEQ ID NO: 4825 - DNA, 23 bp, Artificial sequence
  Primer
cccgactcgtcgacgagtcgggc

SEQ ID NO: 4826 - DNA, 23 bp, Artificial sequence
  Primer
cccgactcgtcgacgagtcgggt

SEQ ID NO: 4827 - DNA, 23 bp, Artificial sequence
  Primer
accgactcgtcgacgagtcggtc

SEQ ID NO: 4828 - DNA, 23 bp, Artificial sequence
  Primer
cacgactcgtcgacgagtcgtgc

SEQ ID NO: 4829 - DNA, 23 bp, Artificial sequence
  Primer
ccagactcgtcgacgagtctggc

SEQ ID NO: 4830 - DNA, 23 bp, Artificial sequence
  Primer
cccgactcgtcgacgagtcggga

SEQ ID NO: 4831 - DNA, 23 bp, Artificial sequence
  Primer
tccgactcgtcgacgagtcggac

SEQ ID NO: 4832 - DNA, 23 bp, Artificial sequence
  Primer
cctgactcgtcgacgagtcaggc

SEQ ID NO: 4833 - DNA, 23 bp, Artificial sequence
  Primer
ggcgactcgtcgacgagtcgccc

SEQ ID NO: 4834 - DNA, 23 bp, Artificial sequence
  Primer
ggcgactcgtcgacgagtcgcct

SEQ ID NO: 4835 - DNA, 23 bp, Artificial sequence
  Primer
agcgactcgtcgacgagtcgctc

SEQ ID NO: 4836 - DNA, 23 bp, Artificial sequence
  Primer
gacgactcgtcgacgagtcgtcc

SEQ ID NO: 4837 - DNA, 23 bp, Artificial sequence
  Primer
ggagactcgtcgacgagtctccc

SEQ ID NO: 4838 - DNA, 23 bp, Artificial sequence
  Primer
ggcgactcgtcgacgagtcgcca

SEQ ID NO: 4839 - DNA, 23 bp, Artificial sequence
  Primer
tgcgactcgtcgacgagtcgcac

SEQ ID NO: 4840 - DNA, 23 bp, Artificial sequence
  Primer
ggtgactcgtcgacgagtcaccc

SEQ ID NO: 4841 - DNA, 23 bp, Artificial sequence
  Primer
cgggactcgtcgacgagtcccgt

SEQ ID NO: 4842 - DNA, 23 bp, Artificial sequence
  Primer
agggactcgtcgacgagtccctg

SEQ ID NO: 4843 - DNA, 23 bp, Artificial sequence
  Primer
caggactcgtcgacgagtcctgg

SEQ ID NO: 4844 - DNA, 23 bp, Artificial sequence
  Primer
cgagactcgtcgacgagtctcgg

SEQ ID NO: 4845 - DNA, 23 bp, Artificial sequence
  Primer
cgggactcgtcgacgagtcccga

SEQ ID NO: 4846 - DNA, 23 bp, Artificial sequence
  Primer
tgggactcgtcgacgagtcccag

SEQ ID NO: 4847 - DNA, 23 bp, Artificial sequence
  Primer
ctggactcgtcgacgagtccagg

SEQ ID NO: 4848 - DNA, 23 bp, Artificial sequence
  Primer
cgtgactcgtcgacgagtcacgg

SEQ ID NO: 4849 - DNA, 23 bp, Artificial sequence
  Primer
ggcgactcgtcgacgagtcgccg

SEQ ID NO: 4850 - DNA, 23 bp, Artificial sequence
  Primer
agcgactcgtcgacgagtcgctg

SEQ ID NO: 4851 - DNA, 23 bp, Artificial sequence
  Primer
gacgactcgtcgacgagtcgtcg

SEQ ID NO: 4852 - DNA, 23 bp, Artificial sequence
  Primer
ggagactcgtcgacgagtctccg

SEQ ID NO: 4853 - DNA, 23 bp, Artificial sequence
  Primer
tgcgactcgtcgacgagtcgcag

SEQ ID NO: 4854 - DNA, 23 bp, Artificial sequence
  Primer
ggtgactcgtcgacgagtcaccg

SEQ ID NO: 4855 - DNA, 23 bp, Artificial sequence
  Primer
acggactcgtcgacgagtccgtg

SEQ ID NO: 4856 - DNA, 23 bp, Artificial sequence
  Primer
ccagactcgtcgacgagtctggg

SEQ ID NO: 4857 - DNA, 23 bp, Artificial sequence
  Primer
tcggactcgtcgacgagtccgag

SEQ ID NO: 4858 - DNA, 23 bp, Artificial sequence
  Primer
cctgactcgtcgacgagtcaggg

SEQ ID NO: 4859 - DNA, 23 bp, Artificial sequence
  Primer
cacgactcgtcgacgagtcgtgg

SEQ ID NO: 4860 - DNA, 23 bp, Artificial sequence
  Primer
gccgactcgtcgacgagtcggct

SEQ ID NO: 4861 - DNA, 23 bp, Artificial sequence
  Primer
gccgactcgtcgacgagtcggca

SEQ ID NO: 4862 - DNA, 23 bp, Artificial sequence
  Primer
cgagactcgtcgacgagtctcgc

SEQ ID NO: 4863 - DNA, 23 bp, Artificial sequence
  Primer
cgtgactcgtcgacgagtcacgc

SEQ ID NO: 4864 - DNA, 23 bp, Artificial sequence
  Primer
caggactcgtcgacgagtcctgc

SEQ ID NO: 4865 - DNA, 23 bp, Artificial sequence
  Primer
ctggactcgtcgacgagtccagc

SEQ ID NO: 4866 - DNA, 23 bp, Artificial sequence
  Primer
gaggactcgtcgacgagtcctcg

SEQ ID NO: 4867 - DNA, 23 bp, Artificial sequence
  Primer
gtggactcgtcgacgagtccacg

SEQ ID NO: 4868 - DNA, 23 bp, Artificial sequence
  Primer
accgactcgtcgacgagtcggtg

SEQ ID NO: 4869 - DNA, 23 bp, Artificial sequence
  Primer
tccgactcgtcgacgagtcggag

SEQ ID NO: 4870 - DNA, 23 bp, Artificial sequence
  Primer
cgggactcgtcgacgagtcccgc

SEQ ID NO: 4871 - DNA, 23 bp, Artificial sequence
  Primer
agggactcgtcgacgagtccctc

SEQ ID NO: 4872 - DNA, 23 bp, Artificial sequence
  Primer
tgggactcgtcgacgagtcccac

SEQ ID NO: 4873 - DNA, 23 bp, Artificial sequence
  Primer
  misc_feature (1)..(3): n is a, c, g, or t
  misc_feature (20)..(23): n is a, c, g, or t
nnngactcctataggagtcnnnn

SEQ ID NO: 4874 - DNA, 23 bp, Artificial sequence
  Primer
gcggactcctataggagtccgcc

SEQ ID NO: 4875 - DNA, 23 bp, Artificial sequence
  Primer
gcggactcctataggagtccgct

SEQ ID NO: 4876 - DNA, 23 bp, Artificial sequence
  Primer
acggactcctataggagtccgtc

SEQ ID NO: 4877 - DNA, 23 bp, Artificial sequence
  Primer
gaggactcctataggagtcctcc

SEQ ID NO: 4878 - DNA, 23 bp, Artificial sequence
  Primer
gcagactcctataggagtctgcc

SEQ ID NO: 4879 - DNA, 23 bp, Artificial sequence
  Primer
gcggactcctataggagtccgca

SEQ ID NO: 4880 - DNA, 23 bp, Artificial sequence
  Primer
tcggactcctataggagtccgac

SEQ ID NO: 4881 - DNA, 23 bp, Artificial sequence
  Primer
gtggactcctataggagtccacc

SEQ ID NO: 4882 - DNA, 23 bp, Artificial sequence
  Primer
gctgactcctataggagtcagcc

SEQ ID NO: 4883 - DNA, 23 bp, Artificial sequence
  Primer
cccgactcctataggagtcgggc

SEQ ID NO: 4884 - DNA, 23 bp, Artificial sequence
  Primer
cccgactcctataggagtcgggt

SEQ ID NO: 4885 - DNA, 23 bp, Artificial sequence
  Primer
accgactcctataggagtcggtc

SEQ ID NO: 4886 - DNA, 23 bp, Artificial sequence
  Primer
cacgactcctataggagtcgtgc

SEQ ID NO: 4887 - DNA, 23 bp, Artificial sequence
  Primer
ccagactcctataggagtctggc

SEQ ID NO: 4888 - DNA, 23 bp, Artificial sequence
  Primer
cccgactcctataggagtcggga

SEQ ID NO: 4889 - DNA, 23 bp, Artificial sequence
  Primer
tccgactcctataggagtcggac

SEQ ID NO: 4890 - DNA, 23 bp, Artificial sequence
  Primer
cctgactcctataggagtcaggc

SEQ ID NO: 4891 - DNA, 23 bp, Artificial sequence
  Primer
ggcgactcctataggagtcgccc

SEQ ID NO: 4892 - DNA, 23 bp, Artificial sequence
  Primer
ggcgactcctataggagtcgcct

SEQ ID NO: 4893 - DNA, 23 bp, Artificial sequence
  Primer
agcgactcctataggagtcgctc

SEQ ID NO: 4894 - DNA, 23 bp, Artificial sequence
  Primer
gacgactcctataggagtcgtcc

SEQ ID NO: 4895 - DNA, 23 bp, Artificial sequence
  Primer
ggagactcctataggagtctccc

SEQ ID NO: 4896 - DNA, 23 bp, Artificial sequence
  Primer
ggcgactcctataggagtcgcca

SEQ ID NO: 4897 - DNA, 23 bp, Artificial sequence
  Primer
tgcgactcctataggagtcgcac

SEQ ID NO: 4898 - DNA, 23 bp, Artificial sequence
  Primer
ggtgactcctataggagtcaccc

SEQ ID NO: 4899 - DNA, 23 bp, Artificial sequence
  Primer
cgggactcctataggagtcccgt

SEQ ID NO: 4900 - DNA, 23 bp, Artificial sequence
  Primer
agggactcctataggagtccctg

SEQ ID NO: 4901 - DNA, 23 bp, Artificial sequence
  Primer
caggactcctataggagtcctgg

SEQ ID NO: 4902 - DNA, 23 bp, Artificial sequence
  Primer
cgagactcctataggagtctcgg

SEQ ID NO: 4903 - DNA, 23 bp, Artificial sequence
  Primer
cgggactcctataggagtcccga

SEQ ID NO: 4904 - DNA, 23 bp, Artificial sequence
  Primer
tgggactcctataggagtcccag

SEQ ID NO: 4905 - DNA, 23 bp, Artificial sequence
  Primer
ctggactcctataggagtccagg

SEQ ID NO: 4906 - DNA, 23 bp, Artificial sequence
  Primer
cgtgactcctataggagtcacgg

SEQ ID NO: 4907 - DNA, 23 bp, Artificial sequence
  Primer
ggcgactcctataggagtcgccg

SEQ ID NO: 4908 - DNA, 23 bp, Artificial sequence
  Primer
agcgactcctataggagtcgctg

SEQ ID NO: 4909 - DNA, 23 bp, Artificial sequence
  Primer
gacgactcctataggagtcgtcg

SEQ ID NO: 4910 - DNA, 23 bp, Artificial sequence
  Primer
ggagactcctataggagtctccg

SEQ ID NO: 4911 - DNA, 23 bp, Artificial sequence
  Primer
tgcgactcctataggagtcgcag

SEQ ID NO: 4912 - DNA, 23 bp, Artificial sequence
  Primer
ggtgactcctataggagtcaccg

SEQ ID NO: 4913 - DNA, 23 bp, Artificial sequence
  Primer
acggactcctataggagtccgtg

SEQ ID NO: 4914 - DNA, 23 bp, Artificial sequence
  Primer
ccagactcctataggagtctggg

SEQ ID NO: 4915 - DNA, 23 bp, Artificial sequence
  Primer
tcggactcctataggagtccgag

SEQ ID NO: 4916 - DNA, 23 bp, Artificial sequence
  Primer
cctgactcctataggagtcaggg

SEQ ID NO: 4917 - DNA, 23 bp, Artificial sequence
  Primer
cacgactcctataggagtcgtgg

SEQ ID NO: 4918 - DNA, 23 bp, Artificial sequence
  Primer
gccgactcctataggagtcggct

SEQ ID NO: 4919 - DNA, 23 bp, Artificial sequence
  Primer
gccgactcctataggagtcggca

SEQ ID NO: 4920 - DNA, 23 bp, Artificial sequence
  Primer
cgagactcctataggagtctcgc

SEQ ID NO: 4921 - DNA, 23 bp, Artificial sequence
  Primer
cgtgactcctataggagtcacgc

SEQ ID NO: 4922 - DNA, 23 bp, Artificial sequence
  Primer
caggactcctataggagtcctgc

SEQ ID NO: 4923 - DNA, 23 bp, Artificial sequence
  Primer
ctggactcctataggagtccagc

SEQ ID NO: 4924 - DNA, 23 bp, Artificial sequence
  Primer
gaggactcctataggagtcctcg

SEQ ID NO: 4925 - DNA, 23 bp, Artificial sequence
  Primer
gtggactcctataggagtccacg

SEQ ID NO: 4926 - DNA, 23 bp, Artificial sequence
  Primer
accgactcctataggagtcggtg

SEQ ID NO: 4927 - DNA, 23 bp, Artificial sequence
  Primer
tccgactcctataggagtcggag

SEQ ID NO: 4928 - DNA, 23 bp, Artificial sequence
  Primer
cgggactcctataggagtcccgc

SEQ ID NO: 4929 - DNA, 23 bp, Artificial sequence
  Primer
agggactcctataggagtccctc

SEQ ID NO: 4930 - DNA, 23 bp, Artificial sequence
  Primer
tgggactcctataggagtcccac

SEQ ID NO: 4931 - DNA, 23 bp, Artificial sequence
  Primer
  misc_feature (1)..(3): n is a, c, g, or t
  misc_feature (20)..(23): n is a, c, g, or t
nnngactccttaaggagtcnnnn

SEQ ID NO: 4932 - DNA, 23 bp, Artificial sequence
  Primer
gcggactccttaaggagtccgcc

SEQ ID NO: 4933 - DNA, 23 bp, Artificial sequence
  Primer
gcggactccttaaggagtccgct

SEQ ID NO: 4934 - DNA, 23 bp, Artificial sequence
  Primer
acggactccttaaggagtccgtc

SEQ ID NO: 4935 - DNA, 23 bp, Artificial sequence
  Primer
gaggactccttaaggagtcctcc

SEQ ID NO: 4936 - DNA, 23 bp, Artificial sequence
  Primer
gcagactccttaaggagtctgcc

SEQ ID NO: 4937 - DNA, 23 bp, Artificial sequence
  Primer
gcggactccttaaggagtccgca

SEQ ID NO: 4938 - DNA, 23 bp, Artificial sequence
  Primer
tcggactccttaaggagtccgac

SEQ ID NO: 4939 - DNA, 23 bp, Artificial sequence
  Primer
gtggactccttaaggagtccacc

SEQ ID NO: 4940 - DNA, 23 bp, Artificial sequence
  Primer
gctgactccttaaggagtcagcc

SEQ ID NO: 4941 - DNA, 23 bp, Artificial sequence
  Primer
cccgactccttaaggagtcgggc

SEQ ID NO: 4942 - DNA, 23 bp, Artificial sequence
  Primer
cccgactccttaaggagtcgggt

SEQ ID NO: 4943 - DNA, 23 bp, Artificial sequence
  Primer
accgactccttaaggagtcggtc

SEQ ID NO: 4944 - DNA, 23 bp, Artificial sequence
  Primer
cacgactccttaaggagtcgtgc

SEQ ID NO: 4945 - DNA, 23 bp, Artificial sequence
  Primer
ccagactccttaaggagtctggc

SEQ ID NO: 4946 - DNA, 23 bp, Artificial sequence
  Primer
cccgactccttaaggagtcggga

SEQ ID NO: 4947 - DNA, 23 bp, Artificial sequence
  Primer
tccgactccttaaggagtcggac

SEQ ID NO: 4948 - DNA, 23 bp, Artificial sequence
  Primer
cctgactccttaaggagtcaggc

SEQ ID NO: 4949 - DNA, 23 bp, Artificial sequence
  Primer
ggcgactccttaaggagtcgccc

SEQ ID NO: 4950 - DNA, 23 bp, Artificial sequence
  Primer
ggcgactccttaaggagtcgcct

SEQ ID NO: 4951 - DNA, 23 bp, Artificial sequence
  Primer
agcgactccttaaggagtcgctc

SEQ ID NO: 4952 - DNA, 23 bp, Artificial sequence
  Primer
gacgactccttaaggagtcgtcc

SEQ ID NO: 4953 - DNA, 23 bp, Artificial sequence
  Primer
ggagactccttaaggagtctccc

SEQ ID NO: 4954 - DNA, 23 bp, Artificial sequence
  Primer
ggcgactccttaaggagtcgcca

SEQ ID NO: 4955 - DNA, 23 bp, Artificial sequence
  Primer
tgcgactccttaaggagtcgcac

SEQ ID NO: 4956 - DNA, 23 bp, Artificial sequence
  Primer
ggtgactccttaaggagtcaccc

SEQ ID NO: 4957 - DNA, 23 bp, Artificial sequence
  Primer
cgggactccttaaggagtcccgt

SEQ ID NO: 4958 - DNA, 23 bp, Artificial sequence
  Primer
agggactccttaaggagtccctg

SEQ ID NO: 4959 - DNA, 23 bp, Artificial sequence
  Primer
caggactccttaaggagtcctgg

SEQ ID NO: 4960 - DNA, 23 bp, Artificial sequence
  Primer
cgagactccttaaggagtctcgg

SEQ ID NO: 4961 - DNA, 23 bp, Artificial sequence
  Primer
cgggactccttaaggagtcccga

SEQ ID NO: 4962 - DNA, 23 bp, Artificial sequence
  Primer
tgggactccttaaggagtcccag

SEQ ID NO: 4963 - DNA, 23 bp, Artificial sequence
  Primer
ctggactccttaaggagtccagg

SEQ ID NO: 4964 - DNA, 23 bp, Artificial sequence
  Primer
cgtgactccttaaggagtcacgg

SEQ ID NO: 4965 - DNA, 23 bp, Artificial sequence
  Primer
ggcgactccttaaggagtcgccg

SEQ ID NO: 4966 - DNA, 23 bp, Artificial sequence
  Primer
agcgactccttaaggagtcgctg

SEQ ID NO: 4967 - DNA, 23 bp, Artificial sequence
  Primer
gacgactccttaaggagtcgtcg

SEQ ID NO: 4968 - DNA, 23 bp, Artificial sequence
  Primer
ggagactccttaaggagtctccg

SEQ ID NO: 4969 - DNA, 23 bp, Artificial sequence
  Primer
tgcgactccttaaggagtcgcag

SEQ ID NO: 4970 - DNA, 23 bp, Artificial sequence
  Primer
ggtgactccttaaggagtcaccg

SEQ ID NO: 4971 - DNA, 23 bp, Artificial sequence
  Primer
acggactccttaaggagtccgtg

SEQ ID NO: 4972 - DNA, 23 bp, Artificial sequence
  Primer
ccagactccttaaggagtctggg

SEQ ID NO: 4973 - DNA, 23 bp, Artificial sequence
  Primer
tcggactccttaaggagtccgag

SEQ ID NO: 4974 - DNA, 23 bp, Artificial sequence
  Primer
cctgactccttaaggagtcaggg

SEQ ID NO: 4975 - DNA, 23 bp, Artificial sequence
  Primer
cacgactccttaaggagtcgtgg

SEQ ID NO: 4976 - DNA, 23 bp, Artificial sequence
  Primer
gccgactccttaaggagtcggct

SEQ ID NO: 4977 - DNA, 23 bp, Artificial sequence
  Primer
gccgactccttaaggagtcggca

SEQ ID NO: 4978 - DNA, 23 bp, Artificial sequence
  Primer
cgagactccttaaggagtctcgc

SEQ ID NO: 4979 - DNA, 23 bp, Artificial sequence
  Primer
cgtgactccttaaggagtcacgc

SEQ ID NO: 4980 - DNA, 23 bp, Artificial sequence
  Primer
caggactccttaaggagtcctgc

SEQ ID NO: 4981 - DNA, 23 bp, Artificial sequence
  Primer
ctggactccttaaggagtccagc

SEQ ID NO: 4982 - DNA, 23 bp, Artificial sequence
  Primer
gaggactccttaaggagtcctcg

SEQ ID NO: 4983 - DNA, 23 bp, Artificial sequence
  Primer
gtggactccttaaggagtccacg

SEQ ID NO: 4984 - DNA, 23 bp, Artificial sequence
  Primer
accgactccttaaggagtcggtg

SEQ ID NO: 4985 - DNA, 23 bp, Artificial sequence
  Primer
tccgactccttaaggagtcggag

SEQ ID NO: 4986 - DNA, 23 bp, Artificial sequence
  Primer
cgggactccttaaggagtcccgc

SEQ ID NO: 4987 - DNA, 23 bp, Artificial sequence
  Primer
agggactccttaaggagtccctc

SEQ ID NO: 4988 - DNA, 23 bp, Artificial sequence
  Primer
tgggactccttaaggagtcccac

SEQ ID NO: 4989 - DNA, 23 bp, Artificial sequence
  Primer
  misc_feature (1)..(3): n is a, c, g, or t
  misc_feature (20)..(23): n is a, c, g, or t
nnngactcctgcaggagtcnnnn

SEQ ID NO: 4990 - DNA, 23 bp, Artificial sequence
  Primer
gcggactcctgcaggagtccgcc

SEQ ID NO: 4991 - DNA, 23 bp, Artificial sequence
  Primer
gcggactcctgcaggagtccgct

SEQ ID NO: 4992 - DNA, 23 bp, Artificial sequence
  Primer
acggactcctgcaggagtccgtc

SEQ ID NO: 4993 - DNA, 23 bp, Artificial sequence
  Primer
gaggactcctgcaggagtcctcc

SEQ ID NO: 4994 - DNA, 23 bp, Artificial sequence
  Primer
gcagactcctgcaggagtctgcc

SEQ ID NO: 4995 - DNA, 23 bp, Artificial sequence
  Primer
gcggactcctgcaggagtccgca

SEQ ID NO: 4996 - DNA, 23 bp, Artificial sequence
  Primer
tcggactcctgcaggagtccgac

SEQ ID NO: 4997 - DNA, 23 bp, Artificial sequence
  Primer
gtggactcctgcaggagtccacc

SEQ ID NO: 4998 - DNA, 23 bp, Artificial sequence
  Primer
gctgactcctgcaggagtcagcc

SEQ ID NO: 4999 - DNA, 23 bp, Artificial sequence
  Primer
cccgactcctgcaggagtcgggc

SEQ ID NO: 5000 - DNA, 23 bp, Artificial sequence
  Primer
cccgactcctgcaggagtcgggt

SEQ ID NO: 5001 - DNA, 23 bp, Artificial sequence
  Primer
accgactcctgcaggagtcggtc

SEQ ID NO: 5002 - DNA, 23 bp, Artificial sequence
  Primer
cacgactcctgcaggagtcgtgc

SEQ ID NO: 5003 - DNA, 23 bp, Artificial sequence
  Primer
ccagactcctgcaggagtctggc

SEQ ID NO: 5004 - DNA, 23 bp, Artificial sequence
  Primer
cccgactcctgcaggagtcggga

SEQ ID NO: 5005 - DNA, 23 bp, Artificial sequence
  Primer
tccgactcctgcaggagtcggac

SEQ ID NO: 5006 - DNA, 23 bp, Artificial sequence
  Primer
cctgactcctgcaggagtcaggc

SEQ ID NO: 5007 - DNA, 23 bp, Artificial sequence
  Primer
ggcgactcctgcaggagtcgccc

SEQ ID NO: 5008 - DNA, 23 bp, Artificial sequence
  Primer
ggcgactcctgcaggagtcgcct

SEQ ID NO: 5009 - DNA, 23 bp, Artificial sequence
  Primer
agcgactcctgcaggagtcgctc

SEQ ID NO: 5010 - DNA, 23 bp, Artificial sequence
  Primer
gacgactcctgcaggagtcgtcc

SEQ ID NO: 5011 - DNA, 23 bp, Artificial sequence
  Primer
ggagactcctgcaggagtctccc

SEQ ID NO: 5012 - DNA, 23 bp, Artificial sequence
  Primer
ggcgactcctgcaggagtcgcca

SEQ ID NO: 5013 - DNA, 23 bp, Artificial sequence
  Primer
tgcgactcctgcaggagtcgcac

SEQ ID NO: 5014 - DNA, 23 bp, Artificial sequence
  Primer
ggtgactcctgcaggagtcaccc

SEQ ID NO: 5015 - DNA, 23 bp, Artificial sequence
  Primer
cgggactcctgcaggagtcccgt

SEQ ID NO: 5016 - DNA, 23 bp, Artificial sequence
  Primer
agggactcctgcaggagtccctg

SEQ ID NO: 5017 - DNA, 23 bp, Artificial sequence
  Primer
caggactcctgcaggagtcctgg

SEQ ID NO: 5018 - DNA, 23 bp, Artificial sequence
  Primer
cgagactcctgcaggagtctcgg

SEQ ID NO: 5019 - DNA, 23 bp, Artificial sequence
  Primer
cgggactcctgcaggagtcccga

SEQ ID NO: 5020 - DNA, 23 bp, Artificial sequence
  Primer
tgggactcctgcaggagtcccag

SEQ ID NO: 5021 - DNA, 23 bp, Artificial sequence
  Primer
ctggactcctgcaggagtccagg

SEQ ID NO: 5022 - DNA, 23 bp, Artificial sequence
  Primer
cgtgactcctgcaggagtcacgg

SEQ ID NO: 5023 - DNA, 23 bp, Artificial sequence
  Primer
ggcgactcctgcaggagtcgccg

SEQ ID NO: 5024 - DNA, 23 bp, Artificial sequence
  Primer
agcgactcctgcaggagtcgctg

SEQ ID NO: 5025 - DNA, 23 bp, Artificial sequence
  Primer
gacgactcctgcaggagtcgtcg

SEQ ID NO: 5026 - DNA, 23 bp, Artificial sequence
  Primer
ggagactcctgcaggagtctccg

SEQ ID NO: 5027 - DNA, 23 bp, Artificial sequence
  Primer
tgcgactcctgcaggagtcgcag

SEQ ID NO: 5028 - DNA, 23 bp, Artificial sequence
  Primer
ggtgactcctgcaggagtcaccg

SEQ ID NO: 5029 - DNA, 23 bp, Artificial sequence
  Primer
acggactcctgcaggagtccgtg

SEQ ID NO: 5030 - DNA, 23 bp, Artificial sequence
  Primer
ccagactcctgcaggagtctggg

SEQ ID NO: 5031 - DNA, 23 bp, Artificial sequence
  Primer
tcggactcctgcaggagtccgag

SEQ ID NO: 5032 - DNA, 23 bp, Artificial sequence
  Primer
cctgactcctgcaggagtcaggg

SEQ ID NO: 5033 - DNA, 23 bp, Artificial sequence
  Primer
cacgactcctgcaggagtcgtgg

SEQ ID NO: 5034 - DNA, 23 bp, Artificial sequence
  Primer
gccgactcctgcaggagtcggct

SEQ ID NO: 5035 - DNA, 23 bp, Artificial sequence
  Primer
gccgactcctgcaggagtcggca

SEQ ID NO: 5036 - DNA, 23 bp, Artificial sequence
  Primer
cgagactcctgcaggagtctcgc

SEQ ID NO: 5037 - DNA, 23 bp, Artificial sequence
  Primer
cgtgactcctgcaggagtcacgc

SEQ ID NO: 5038 - DNA, 23 bp, Artificial sequence
  Primer
caggactcctgcaggagtcctgc

SEQ ID NO: 5039 - DNA, 23 bp, Artificial sequence
  Primer
ctggactcctgcaggagtccagc

SEQ ID NO: 5040 - DNA, 23 bp, Artificial sequence
  Primer
gaggactcctgcaggagtcctcg

SEQ ID NO: 5041 - DNA, 23 bp, Artificial sequence
  Primer
gtggactcctgcaggagtccacg

SEQ ID NO: 5042 - DNA, 23 bp, Artificial sequence
  Primer
accgactcctgcaggagtcggtg

SEQ ID NO: 5043 - DNA, 23 bp, Artificial sequence
  Primer
tccgactcctgcaggagtcggag

SEQ ID NO: 5044 - DNA, 23 bp, Artificial sequence
  Primer
cgggactcctgcaggagtcccgc

SEQ ID NO: 5045 - DNA, 23 bp, Artificial sequence
  Primer
agggactcctgcaggagtccctc

SEQ ID NO: 5046 - DNA, 23 bp, Artificial sequence
  Primer
tgggactcctgcaggagtcccac

SEQ ID NO: 5047 - DNA, 23 bp, Artificial sequence
  Primer
  misc_feature (1)..(3): n is a, c, g, or t
  misc_feature (20)..(23): n is a, c, g, or t
nnngactcctcgaggagtcnnnn

SEQ ID NO: 5048 - DNA, 23 bp, Artificial sequence
  Primer
gcggactcctcgaggagtccgcc

SEQ ID NO: 5049 - DNA, 23 bp, Artificial sequence
  Primer
gcggactcctcgaggagtccgct

SEQ ID NO: 5050 - DNA, 23 bp, Artificial sequence
  Primer
acggactcctcgaggagtccgtc

SEQ ID NO: 5051 - DNA, 23 bp, Artificial sequence
  Primer
gaggactcctcgaggagtcctcc

SEQ ID NO: 5052 - DNA, 23 bp, Artificial sequence
  Primer
gcagactcctcgaggagtctgcc

SEQ ID NO: 5053 - DNA, 23 bp, Artificial sequence
  Primer
gcggactcctcgaggagtccgca

SEQ ID NO: 5054 - DNA, 23 bp, Artificial sequence
  Primer
tcggactcctcgaggagtccgac

SEQ ID NO: 5055 - DNA, 23 bp, Artificial sequence
  Primer
gtggactcctcgaggagtccacc

SEQ ID NO: 5056 - DNA, 23 bp, Artificial sequence
  Primer
gctgactcctcgaggagtcagcc

SEQ ID NO: 5057 - DNA, 23 bp, Artificial sequence
  Primer
cccgactcctcgaggagtcgggc

SEQ ID NO: 5058 - DNA, 23 bp, Artificial sequence
  Primer
cccgactcctcgaggagtcgggt

SEQ ID NO: 5059 - DNA, 23 bp, Artificial sequence
  Primer
accgactcctcgaggagtcggtc

SEQ ID NO: 5060 - DNA, 23 bp, Artificial sequence
  Primer
cacgactcctcgaggagtcgtgc

SEQ ID NO: 5061 - DNA, 23 bp, Artificial sequence
  Primer
ccagactcctcgaggagtctggc

SEQ ID NO: 5062 - DNA, 23 bp, Artificial sequence
  Primer
cccgactcctcgaggagtcggga

SEQ ID NO: 5063 - DNA, 23 bp, Artificial sequence
  Primer
tccgactcctcgaggagtcggac

SEQ ID NO: 5064 - DNA, 23 bp, Artificial sequence
  Primer
cctgactcctcgaggagtcaggc

SEQ ID NO: 5065 - DNA, 23 bp, Artificial sequence
  Primer
ggcgactcctcgaggagtcgccc

SEQ ID NO: 5066 - DNA, 23 bp, Artificial sequence
  Primer
ggcgactcctcgaggagtcgcct

SEQ ID NO: 5067 - DNA, 23 bp, Artificial sequence
  Primer
agcgactcctcgaggagtcgctc

SEQ ID NO: 5068 - DNA, 23 bp, Artificial sequence
  Primer
gacgactcctcgaggagtcgtcc

SEQ ID NO: 5069 - DNA, 23 bp, Artificial sequence
  Primer
ggagactcctcgaggagtctccc

SEQ ID NO: 5070 - DNA, 23 bp, Artificial sequence
  Primer
ggcgactcctcgaggagtcgcca

SEQ ID NO: 5071 - DNA, 23 bp, Artificial sequence
  Primer
tgcgactcctcgaggagtcgcac

SEQ ID NO: 5072 - DNA, 23 bp, Artificial sequence
  Primer
ggtgactcctcgaggagtcaccc

SEQ ID NO: 5073 - DNA, 23 bp, Artificial sequence
  Primer
cgggactcctcgaggagtcccgt

SEQ ID NO: 5074 - DNA, 23 bp, Artificial sequence
  Primer
agggactcctcgaggagtccctg

SEQ ID NO: 5075 - DNA, 23 bp, Artificial sequence
  Primer
caggactcctcgaggagtcctgg

SEQ ID NO: 5076 - DNA, 23 bp, Artificial sequence
  Primer
cgagactcctcgaggagtctcgg

SEQ ID NO: 5077 - DNA, 23 bp, Artificial sequence
  Primer
cgggactcctcgaggagtcccga

SEQ ID NO: 5078 - DNA, 23 bp, Artificial sequence
  Primer
tgggactcctcgaggagtcccag

SEQ ID NO: 5079 - DNA, 23 bp, Artificial sequence
  Primer
ctggactcctcgaggagtccagg

SEQ ID NO: 5080 - DNA, 23 bp, Artificial sequence
  Primer
cgtgactcctcgaggagtcacgg

SEQ ID NO: 5081 - DNA, 23 bp, Artificial sequence
  Primer
ggcgactcctcgaggagtcgccg

SEQ ID NO: 5082 - DNA, 23 bp, Artificial sequence
  Primer
agcgactcctcgaggagtcgctg

SEQ ID NO: 5083 - DNA, 23 bp, Artificial sequence
  Primer
gacgactcctcgaggagtcgtcg

SEQ ID NO: 5084 - DNA, 23 bp, Artificial sequence
  Primer
ggagactcctcgaggagtctccg

SEQ ID NO: 5085 - DNA, 23 bp, Artificial sequence
  Primer
tgcgactcctcgaggagtcgcag

SEQ ID NO: 5086 - DNA, 23 bp, Artificial sequence
  Primer
ggtgactcctcgaggagtcaccg

SEQ ID NO: 5087 - DNA, 23 bp, Artificial sequence
  Primer
acggactcctcgaggagtccgtg

SEQ ID NO: 5088 - DNA, 23 bp, Artificial sequence
  Primer
ccagactcctcgaggagtctggg

SEQ ID NO: 5089 - DNA, 23 bp, Artificial sequence
  Primer
tcggactcctcgaggagtccgag

SEQ ID NO: 5090 - DNA, 23 bp, Artificial sequence
  Primer
cctgactcctcgaggagtcaggg

SEQ ID NO: 5091 - DNA, 23 bp, Artificial sequence
  Primer
cacgactcctcgaggagtcgtgg

SEQ ID NO: 5092 - DNA, 23 bp, Artificial sequence
  Primer
gccgactcctcgaggagtcggct

SEQ ID NO: 5093 - DNA, 23 bp, Artificial sequence
  Primer
gccgactcctcgaggagtcggca

SEQ ID NO: 5094 - DNA, 23 bp, Artificial sequence
  Primer
cgagactcctcgaggagtctcgc

SEQ ID NO: 5095 - DNA, 23 bp, Artificial sequence
  Primer
cgtgactcctcgaggagtcacgc

SEQ ID NO: 5096 - DNA, 23 bp, Artificial sequence
  Primer
caggactcctcgaggagtcctgc

SEQ ID NO: 5097 - DNA, 23 bp, Artificial sequence
  Primer
ctggactcctcgaggagtccagc

SEQ ID NO: 5098 - DNA, 23 bp, Artificial sequence
  Primer
gaggactcctcgaggagtcctcg

SEQ ID NO: 5099 - DNA, 23 bp, Artificial sequence
  Primer
gtggactcctcgaggagtccacg

SEQ ID NO: 5100 - DNA, 23 bp, Artificial sequence
  Primer
accgactcctcgaggagtcggtg

SEQ ID NO: 5101 - DNA, 23 bp, Artificial sequence
  Primer
tccgactcctcgaggagtcggag

SEQ ID NO: 5102 - DNA, 23 bp, Artificial sequence
  Primer
cgggactcctcgaggagtcccgc

SEQ ID NO: 5103 - DNA, 23 bp, Artificial sequence
  Primer
agggactcctcgaggagtccctc

SEQ ID NO: 5104 - DNA, 23 bp, Artificial sequence
  Primer
tgggactcctcgaggagtcccac

SEQ ID NO: 5105 - DNA, 23 bp, Artificial sequence
  Primer
  misc_feature (1)..(3): n is a, c, g, or t
  misc_feature (20)..(23): n is a, c, g, or t
nnngactccaattggagtcnnnn

SEQ ID NO: 5106 - DNA, 23 bp, Artificial sequence
  Primer
gcggactccaattggagtccgcc

SEQ ID NO: 5107 - DNA, 23 bp, Artificial sequence
  Primer
gcggactccaattggagtccgct

SEQ ID NO: 5108 - DNA, 23 bp, Artificial sequence
  Primer
acggactccaattggagtccgtc

SEQ ID NO: 5109 - DNA, 23 bp, Artificial sequence
  Primer
gaggactccaattggagtcctcc

SEQ ID NO: 5110 - DNA, 23 bp, Artificial sequence
  Primer
gcagactccaattggagtctgcc

SEQ ID NO: 5111 - DNA, 23 bp, Artificial sequence
  Primer
gcggactccaattggagtccgca

SEQ ID NO: 5112 - DNA, 23 bp, Artificial sequence
  Primer
tcggactccaattggagtccgac

SEQ ID NO: 5113 - DNA, 23 bp, Artificial sequence
  Primer
gtggactccaattggagtccacc

SEQ ID NO: 5114 - DNA, 23 bp, Artificial sequence
  Primer
gctgactccaattggagtcagcc

SEQ ID NO: 5115 - DNA, 23 bp, Artificial sequence
  Primer
cccgactccaattggagtcgggc

SEQ ID NO: 5116 - DNA, 23 bp, Artificial sequence
  Primer
cccgactccaattggagtcgggt

SEQ ID NO: 5117 - DNA, 23 bp, Artificial sequence
  Primer
accgactccaattggagtcggtc

SEQ ID NO: 5118 - DNA, 23 bp, Artificial sequence
  Primer
cacgactccaattggagtcgtgc

SEQ ID NO: 5119 - DNA, 23 bp, Artificial sequence
  Primer
ccagactccaattggagtctggc

SEQ ID NO: 5120 - DNA, 23 bp, Artificial sequence
  Primer
cccgactccaattggagtcggga

SEQ ID NO: 5121 - DNA, 23 bp, Artificial sequence
  Primer
tccgactccaattggagtcggac

SEQ ID NO: 5122 - DNA, 23 bp, Artificial sequence
  Primer
cctgactccaattggagtcaggc

SEQ ID NO: 5123 - DNA, 23 bp, Artificial sequence
  Primer
ggcgactccaattggagtcgccc

SEQ ID NO: 5124 - DNA, 23 bp, Artificial sequence
  Primer
ggcgactccaattggagtcgcct

SEQ ID NO: 5125 - DNA, 23 bp, Artificial sequence
  Primer
agcgactccaattggagtcgctc

SEQ ID NO: 5126 - DNA, 23 bp, Artificial sequence
  Primer
gacgactccaattggagtcgtcc

SEQ ID NO: 5127 - DNA, 23 bp, Artificial sequence
  Primer
ggagactccaattggagtctccc

SEQ ID NO: 5128 - DNA, 23 bp, Artificial sequence
  Primer
ggcgactccaattggagtcgcca

SEQ ID NO: 5129 - DNA, 23 bp, Artificial sequence
  Primer
tgcgactccaattggagtcgcac

SEQ ID NO: 5130 - DNA, 23 bp, Artificial sequence
  Primer
ggtgactccaattggagtcaccc

SEQ ID NO: 5131 - DNA, 23 bp, Artificial sequence
  Primer
cgggactccaattggagtcccgt

SEQ ID NO: 5132 - DNA, 23 bp, Artificial sequence
  Primer
agggactccaattggagtccctg

SEQ ID NO: 5133 - DNA, 23 bp, Artificial sequence
  Primer
caggactccaattggagtcctgg

SEQ ID NO: 5134 - DNA, 23 bp, Artificial sequence
  Primer
cgagactccaattggagtctcgg

SEQ ID NO: 5135 - DNA, 23 bp, Artificial sequence
  Primer
cgggactccaattggagtcccga

SEQ ID NO: 5136 - DNA, 23 bp, Artificial sequence
  Primer
tgggactccaattggagtcccag

SEQ ID NO: 5137 - DNA, 23 bp, Artificial sequence
  Primer
ctggactccaattggagtccagg

SEQ ID NO: 5138 - DNA, 23 bp, Artificial sequence
  Primer
cgtgactccaattggagtcacgg

SEQ ID NO: 5139 - DNA, 23 bp, Artificial sequence
  Primer
ggcgactccaattggagtcgccg

SEQ ID NO: 5140 - DNA, 23 bp, Artificial sequence
  Primer
agcgactccaattggagtcgctg

SEQ ID NO: 5141 - DNA, 23 bp, Artificial sequence
  Primer
gacgactccaattggagtcgtcg

SEQ ID NO: 5142 - DNA, 23 bp, Artificial sequence
  Primer
ggagactccaattggagtctccg

SEQ ID NO: 5143 - DNA, 23 bp, Artificial sequence
  Primer
tgcgactccaattggagtcgcag

SEQ ID NO: 5144 - DNA, 23 bp, Artificial sequence
  Primer
ggtgactccaattggagtcaccg

SEQ ID NO: 5145 - DNA, 23 bp, Artificial sequence
  Primer
acggactccaattggagtccgtg

SEQ ID NO: 5146 - DNA, 23 bp, Artificial sequence
  Primer
ccagactccaattggagtctggg

SEQ ID NO: 5147 - DNA, 23 bp, Artificial sequence
  Primer
tcggactccaattggagtccgag

SEQ ID NO: 5148 - DNA, 23 bp, Artificial sequence
  Primer
cctgactccaattggagtcaggg

SEQ ID NO: 5149 - DNA, 23 bp, Artificial sequence
  Primer
cacgactccaattggagtcgtgg

SEQ ID NO: 5150 - DNA, 23 bp, Artificial sequence
  Primer
gccgactccaattggagtcggct

SEQ ID NO: 5151 - DNA, 23 bp, Artificial sequence
  Primer
gccgactccaattggagtcggca

SEQ ID NO: 5152 - DNA, 23 bp, Artificial sequence
  Primer
cgagactccaattggagtctcgc

SEQ ID NO: 5153 - DNA, 23 bp, Artificial sequence
  Primer
cgtgactccaattggagtcacgc

SEQ ID NO: 5154 - DNA, 23 bp, Artificial sequence
  Primer
caggactccaattggagtcctgc

SEQ ID NO: 5155 - DNA, 23 bp, Artificial sequence
  Primer
ctggactccaattggagtccagc

SEQ ID NO: 5156 - DNA, 23 bp, Artificial sequence
  Primer
gaggactccaattggagtcctcg

SEQ ID NO: 5157 - DNA, 23 bp, Artificial sequence
  Primer
gtggactccaattggagtccacg

SEQ ID NO: 5158 - DNA, 23 bp, Artificial sequence
  Primer
accgactccaattggagtcggtg

SEQ ID NO: 5159 - DNA, 23 bp, Artificial sequence
  Primer
tccgactccaattggagtcggag

SEQ ID NO: 5160 - DNA, 23 bp, Artificial sequence
  Primer
cgggactccaattggagtcccgc

SEQ ID NO: 5161 - DNA, 23 bp, Artificial sequence
  Primer
agggactccaattggagtccctc

SEQ ID NO: 5162 - DNA, 23 bp, Artificial sequence
  Primer
tgggactccaattggagtcccac

SEQ ID NO: 5163 - DNA, 23 bp, Artificial sequence
  Primer
  misc_feature (1)..(3): n is a, c, g, or t
  misc_feature (20)..(23): n is a, c, g, or t
nnngactccatatggagtcnnnn

SEQ ID NO: 5164 - DNA, 23 bp, Artificial sequence
  Primer
gcggactccatatggagtccgcc

SEQ ID NO: 5165 - DNA, 23 bp, Artificial sequence
  Primer
gcggactccatatggagtccgct

SEQ ID NO: 5166 - DNA, 23 bp, Artificial sequence
  Primer
acggactccatatggagtccgtc

SEQ ID NO: 5167 - DNA, 23 bp, Artificial sequence
  Primer
gaggactccatatggagtcctcc

SEQ ID NO: 5168 - DNA, 23 bp, Artificial sequence
  Primer
gcagactccatatggagtctgcc

SEQ ID NO: 5169 - DNA, 23 bp, Artificial sequence
  Primer
gcggactccatatggagtccgca

SEQ ID NO: 5170 - DNA, 23 bp, Artificial sequence
  Primer
tcggactccatatggagtccgac

SEQ ID NO: 5171 - DNA, 23 bp, Artificial sequence
  Primer
gtggactccatatggagtccacc

SEQ ID NO: 5172 - DNA, 23 bp, Artificial sequence
  Primer
gctgactccatatggagtcagcc

SEQ ID NO: 5173 - DNA, 23 bp, Artificial sequence
  Primer
cccgactccatatggagtcgggc

SEQ ID NO: 5174 - DNA, 23 bp, Artificial sequence
  Primer
cccgactccatatggagtcgggt

SEQ ID NO: 5175 - DNA, 23 bp, Artificial sequence
  Primer
accgactccatatggagtcggtc

SEQ ID NO: 5176 - DNA, 23 bp, Artificial sequence
  Primer
cacgactccatatggagtcgtgc

SEQ ID NO: 5177 - DNA, 23 bp, Artificial sequence
  Primer
ccagactccatatggagtctggc

SEQ ID NO: 5178 - DNA, 23 bp, Artificial sequence
  Primer
cccgactccatatggagtcggga

SEQ ID NO: 5179 - DNA, 23 bp, Artificial sequence
  Primer
tccgactccatatggagtcggac

SEQ ID NO: 5180 - DNA, 23 bp, Artificial sequence
  Primer
cctgactccatatggagtcaggc

SEQ ID NO: 5181 - DNA, 23 bp, Artificial sequence
  Primer
ggcgactccatatggagtcgccc

SEQ ID NO: 5182 - DNA, 23 bp, Artificial sequence
  Primer
ggcgactccatatggagtcgcct

SEQ ID NO: 5183 - DNA, 23 bp, Artificial sequence
  Primer
agcgactccatatggagtcgctc

SEQ ID NO: 5184 - DNA, 23 bp, Artificial sequence
  Primer
gacgactccatatggagtcgtcc

SEQ ID NO: 5185 - DNA, 23 bp, Artificial sequence
  Primer
ggagactccatatggagtctccc

SEQ ID NO: 5186 - DNA, 23 bp, Artificial sequence
  Primer
ggcgactccatatggagtcgcca

SEQ ID NO: 5187 - DNA, 23 bp, Artificial sequence
  Primer
tgcgactccatatggagtcgcac

SEQ ID NO: 5188 - DNA, 23 bp, Artificial sequence
  Primer
ggtgactccatatggagtcaccc

SEQ ID NO: 5189 - DNA, 23 bp, Artificial sequence
  Primer
cgggactccatatggagtcccgt

SEQ ID NO: 5190 - DNA, 23 bp, Artificial sequence
  Primer
agggactccatatggagtccctg

SEQ ID NO: 5191 - DNA, 23 bp, Artificial sequence
  Primer
caggactccatatggagtcctgg

SEQ ID NO: 5192 - DNA, 23 bp, Artificial sequence
  Primer
cgagactccatatggagtctcgg

SEQ ID NO: 5193 - DNA, 23 bp, Artificial sequence
  Primer
cgggactccatatggagtcccga

SEQ ID NO: 5194 - DNA, 23 bp, Artificial sequence
  Primer
tgggactccatatggagtcccag

SEQ ID NO: 5195 - DNA, 23 bp, Artificial sequence
  Primer
ctggactccatatggagtccagg

SEQ ID NO: 5196 - DNA, 23 bp, Artificial sequence
  Primer
cgtgactccatatggagtcacgg

SEQ ID NO: 5197 - DNA, 23 bp, Artificial sequence
  Primer
ggcgactccatatggagtcgccg

SEQ ID NO: 5198 - DNA, 23 bp, Artificial sequence
  Primer
agcgactccatatggagtcgctg

SEQ ID NO: 5199 - DNA, 23 bp, Artificial sequence
  Primer
gacgactccatatggagtcgtcg

SEQ ID NO: 5200 - DNA, 23 bp, Artificial sequence
  Primer
ggagactccatatggagtctccg

SEQ ID NO: 5201 - DNA, 23 bp, Artificial sequence
  Primer
tgcgactccatatggagtcgcag

SEQ ID NO: 5202 - DNA, 23 bp, Artificial sequence
  Primer
ggtgactccatatggagtcaccg

SEQ ID NO: 5203 - DNA, 23 bp, Artificial sequence
  Primer
acggactccatatggagtccgtg

SEQ ID NO: 5204 - DNA, 23 bp, Artificial sequence
  Primer
ccagactccatatggagtctggg

SEQ ID NO: 5205 - DNA, 23 bp, Artificial sequence
  Primer
tcggactccatatggagtccgag

SEQ ID NO: 5206 - DNA, 23 bp, Artificial sequence
  Primer
cctgactccatatggagtcaggg

SEQ ID NO: 5207 - DNA, 23 bp, Artificial sequence
  Primer
cacgactccatatggagtcgtgg

SEQ ID NO: 5208 - DNA, 23 bp, Artificial sequence
  Primer
gccgactccatatggagtcggct

SEQ ID NO: 5209 - DNA, 23 bp, Artificial sequence
  Primer
gccgactccatatggagtcggca

SEQ ID NO: 5210 - DNA, 23 bp, Artificial sequence
  Primer
cgagactccatatggagtctcgc

SEQ ID NO: 5211 - DNA, 23 bp, Artificial sequence
  Primer
cgtgactccatatggagtcacgc

SEQ ID NO: 5212 - DNA, 23 bp, Artificial sequence
  Primer
caggactccatatggagtcctgc

SEQ ID NO: 5213 - DNA, 23 bp, Artificial sequence
  Primer
ctggactccatatggagtccagc

SEQ ID NO: 5214 - DNA, 23 bp, Artificial sequence
  Primer
gaggactccatatggagtcctcg

SEQ ID NO: 5215 - DNA, 23 bp, Artificial sequence
  Primer
gtggactccatatggagtccacg

SEQ ID NO: 5216 - DNA, 23 bp, Artificial sequence
  Primer
accgactccatatggagtcggtg

SEQ ID NO: 5217 - DNA, 23 bp, Artificial sequence
  Primer
tccgactccatatggagtcggag

SEQ ID NO: 5218 - DNA, 23 bp, Artificial sequence
  Primer
cgggactccatatggagtcccgc

SEQ ID NO: 5219 - DNA, 23 bp, Artificial sequence
  Primer
agggactccatatggagtccctc

SEQ ID NO: 5220 - DNA, 23 bp, Artificial sequence
  Primer
tgggactccatatggagtcccac

SEQ ID NO: 5221 - DNA, 23 bp, Artificial sequence
  Primer
  misc_feature (1)..(3): n is a, c, g, or t
  misc_feature (20)..(23): n is a, c, g, or t
nnngactccagctggagtcnnnn

SEQ ID NO: 5222 - DNA, 23 bp, Artificial sequence
  Primer
gcggactccagctggagtccgcc

SEQ ID NO: 5223 - DNA, 23 bp, Artificial sequence
  Primer
gcggactccagctggagtccgct

SEQ ID NO: 5224 - DNA, 23 bp, Artificial sequence
  Primer
acggactccagctggagtccgtc

SEQ ID NO: 5225 - DNA, 23 bp, Artificial sequence
  Primer
gaggactccagctggagtcctcc

SEQ ID NO: 5226 - DNA, 23 bp, Artificial sequence
  Primer
gcagactccagctggagtctgcc

SEQ ID NO: 5227 - DNA, 23 bp, Artificial sequence
  Primer
gcggactccagctggagtccgca

SEQ ID NO: 5228 - DNA, 23 bp, Artificial sequence
  Primer
tcggactccagctggagtccgac

SEQ ID NO: 5229 - DNA, 23 bp, Artificial sequence
  Primer
gtggactccagctggagtccacc

SEQ ID NO: 5230 - DNA, 23 bp, Artificial sequence
  Primer
gctgactccagctggagtcagcc

SEQ ID NO: 5231 - DNA, 23 bp, Artificial sequence
  Primer
cccgactccagctggagtcgggc

SEQ ID NO: 5232 - DNA, 23 bp, Artificial sequence
  Primer
cccgactccagctggagtcgggt

SEQ ID NO: 5233 - DNA, 23 bp, Artificial sequence
  Primer
accgactccagctggagtcggtc

SEQ ID NO: 5234 - DNA, 23 bp, Artificial sequence
  Primer
cacgactccagctggagtcgtgc

SEQ ID NO: 5235 - DNA, 23 bp, Artificial sequence
  Primer
ccagactccagctggagtctggc

SEQ ID NO: 5236 - DNA, 23 bp, Artificial sequence
  Primer
cccgactccagctggagtcggga

SEQ ID NO: 5237 - DNA, 23 bp, Artificial sequence
  Primer
tccgactccagctggagtcggac

SEQ ID NO: 5238 - DNA, 23 bp, Artificial sequence
  Primer
cctgactccagctggagtcaggc

SEQ ID NO: 5239 - DNA, 23 bp, Artificial sequence
  Primer
ggcgactccagctggagtcgccc

SEQ ID NO: 5240 - DNA, 23 bp, Artificial sequence
  Primer
ggcgactccagctggagtcgcct

SEQ ID NO: 5241 - DNA, 23 bp, Artificial sequence
  Primer
agcgactccagctggagtcgctc

SEQ ID NO: 5242 - DNA, 23 bp, Artificial sequence
  Primer
gacgactccagctggagtcgtcc

SEQ ID NO: 5243 - DNA, 23 bp, Artificial sequence
  Primer
ggagactccagctggagtctccc

SEQ ID NO: 5244 - DNA, 23 bp, Artificial sequence
  Primer
ggcgactccagctggagtcgcca

SEQ ID NO: 5245 - DNA, 23 bp, Artificial sequence
  Primer
tgcgactccagctggagtcgcac

SEQ ID NO: 5246 - DNA, 23 bp, Artificial sequence
  Primer
ggtgactccagctggagtcaccc

SEQ ID NO: 5247 - DNA, 23 bp, Artificial sequence
  Primer
cgggactccagctggagtcccgt

SEQ ID NO: 5248 - DNA, 23 bp, Artificial sequence
  Primer
agggactccagctggagtccctg

SEQ ID NO: 5249 - DNA, 23 bp, Artificial sequence
  Primer
caggactccagctggagtcctgg

SEQ ID NO: 5250 - DNA, 23 bp, Artificial sequence
  Primer
cgagactccagctggagtctcgg

SEQ ID NO: 5251 - DNA, 23 bp, Artificial sequence
  Primer
cgggactccagctggagtcccga

SEQ ID NO: 5252 - DNA, 23 bp, Artificial sequence
  Primer
tgggactccagctggagtcccag

SEQ ID NO: 5253 - DNA, 23 bp, Artificial sequence
  Primer
ctggactccagctggagtccagg

SEQ ID NO: 5254 - DNA, 23 bp, Artificial sequence
  Primer
cgtgactccagctggagtcacgg

SEQ ID NO: 5255 - DNA, 23 bp, Artificial sequence
  Primer
ggcgactccagctggagtcgccg

SEQ ID NO: 5256 - DNA, 23 bp, Artificial sequence
  Primer
agcgactccagctggagtcgctg

SEQ ID NO: 5257 - DNA, 23 bp, Artificial sequence
  Primer
gacgactccagctggagtcgtcg

SEQ ID NO: 5258 - DNA, 23 bp, Artificial sequence
  Primer
ggagactccagctggagtctccg

SEQ ID NO: 5259 - DNA, 23 bp, Artificial sequence
  Primer
tgcgactccagctggagtcgcag

SEQ ID NO: 5260 - DNA, 23 bp, Artificial sequence
  Primer
ggtgactccagctggagtcaccg

SEQ ID NO: 5261 - DNA, 23 bp, Artificial sequence
  Primer
acggactccagctggagtccgtg

SEQ ID NO: 5262 - DNA, 23 bp, Artificial sequence
  Primer
ccagactccagctggagtctggg

SEQ ID NO: 5263 - DNA, 23 bp, Artificial sequence
  Primer
tcggactccagctggagtccgag

SEQ ID NO: 5264 - DNA, 23 bp, Artificial sequence
  Primer
cctgactccagctggagtcaggg

SEQ ID NO: 5265 - DNA, 23 bp, Artificial sequence
  Primer
cacgactccagctggagtcgtgg

SEQ ID NO: 5266 - DNA, 23 bp, Artificial sequence
  Primer
gccgactccagctggagtcggct

SEQ ID NO: 5267 - DNA, 23 bp, Artificial sequence
  Primer
gccgactccagctggagtcggca

SEQ ID NO: 5268 - DNA, 23 bp, Artificial sequence
  Primer
cgagactccagctggagtctcgc

SEQ ID NO: 5269 - DNA, 23 bp, Artificial sequence
  Primer
cgtgactccagctggagtcacgc

SEQ ID NO: 5270 - DNA, 23 bp, Artificial sequence
  Primer
caggactccagctggagtcctgc

SEQ ID NO: 5271 - DNA, 23 bp, Artificial sequence
  Primer
ctggactccagctggagtccagc

SEQ ID NO: 5272 - DNA, 23 bp, Artificial sequence
  Primer
gaggactccagctggagtcctcg

SEQ ID NO: 5273 - DNA, 23 bp, Artificial sequence
  Primer
gtggactccagctggagtccacg

SEQ ID NO: 5274 - DNA, 23 bp, Artificial sequence
  Primer
accgactccagctggagtcggtg

SEQ ID NO: 5275 - DNA, 23 bp, Artificial sequence
  Primer
tccgactccagctggagtcggag

SEQ ID NO: 5276 - DNA, 23 bp, Artificial sequence
  Primer
cgggactccagctggagtcccgc

SEQ ID NO: 5277 - DNA, 23 bp, Artificial sequence
  Primer
agggactccagctggagtccctc

SEQ ID NO: 5278 - DNA, 23 bp, Artificial sequence
  Primer
tgggactccagctggagtcccac

SEQ ID NO: 5279 - DNA, 23 bp, Artificial sequence
  Primer
  misc_feature (1)..(3): n is a, c, g, or t
  misc_feature (20)..(23): n is a, c, g, or t
nnngactccacgtggagtcnnnn

SEQ ID NO: 5280 - DNA, 23 bp, Artificial sequence
  Primer
gcggactccacgtggagtccgcc

SEQ ID NO: 5281 - DNA, 23 bp, Artificial sequence
  Primer
gcggactccacgtggagtccgct

SEQ ID NO: 5282 - DNA, 23 bp, Artificial sequence
  Primer
acggactccacgtggagtccgtc

SEQ ID NO: 5283 - DNA, 23 bp, Artificial sequence
  Primer
gaggactccacgtggagtcctcc

SEQ ID NO: 5284 - DNA, 23 bp, Artificial sequence
  Primer
gcagactccacgtggagtctgcc

SEQ ID NO: 5285 - DNA, 23 bp, Artificial sequence
  Primer
gcggactccacgtggagtccgca

SEQ ID NO: 5286 - DNA, 23 bp, Artificial sequence
  Primer
tcggactccacgtggagtccgac

SEQ ID NO: 5287 - DNA, 23 bp, Artificial sequence
  Primer
gtggactccacgtggagtccacc

SEQ ID NO: 5288 - DNA, 23 bp, Artificial sequence
  Primer
gctgactccacgtggagtcagcc

SEQ ID NO: 5289 - DNA, 23 bp, Artificial sequence
  Primer
cccgactccacgtggagtcgggc

SEQ ID NO: 5290 - DNA, 23 bp, Artificial sequence
  Primer
cccgactccacgtggagtcgggt

SEQ ID NO: 5291 - DNA, 23 bp, Artificial sequence
  Primer
accgactccacgtggagtcggtc

SEQ ID NO: 5292 - DNA, 23 bp, Artificial sequence
  Primer
cacgactccacgtggagtcgtgc

SEQ ID NO: 5293 - DNA, 23 bp, Artificial sequence
  Primer
ccagactccacgtggagtctggc

SEQ ID NO: 5294 - DNA, 23 bp, Artificial sequence
  Primer
cccgactccacgtggagtcggga

SEQ ID NO: 5295 - DNA, 23 bp, Artificial sequence
  Primer
tccgactccacgtggagtcggac

SEQ ID NO: 5296 - DNA, 23 bp, Artificial sequence
  Primer
cctgactccacgtggagtcaggc

SEQ ID NO: 5297 - DNA, 23 bp, Artificial sequence
  Primer
ggcgactccacgtggagtcgccc

SEQ ID NO: 5298 - DNA, 23 bp, Artificial sequence
  Primer
ggcgactccacgtggagtcgcct

SEQ ID NO: 5299 - DNA, 23 bp, Artificial sequence
  Primer
agcgactccacgtggagtcgctc

SEQ ID NO: 5300 - DNA, 23 bp, Artificial sequence
  Primer
gacgactccacgtggagtcgtcc

SEQ ID NO: 5301 - DNA, 23 bp, Artificial sequence
  Primer
ggagactccacgtggagtctccc

SEQ ID NO: 5302 - DNA, 23 bp, Artificial sequence
  Primer
ggcgactccacgtggagtcgcca

SEQ ID NO: 5303 - DNA, 23 bp, Artificial sequence
  Primer
tgcgactccacgtggagtcgcac

SEQ ID NO: 5304 - DNA, 23 bp, Artificial sequence
  Primer
ggtgactccacgtggagtcaccc

SEQ ID NO: 5305 - DNA, 23 bp, Artificial sequence
  Primer
cgggactccacgtggagtcccgt

SEQ ID NO: 5306 - DNA, 23 bp, Artificial sequence
  Primer
agggactccacgtggagtccctg

SEQ ID NO: 5307 - DNA, 23 bp, Artificial sequence
  Primer
caggactccacgtggagtcctgg

SEQ ID NO: 5308 - DNA, 23 bp, Artificial sequence
  Primer
cgagactccacgtggagtctcgg

SEQ ID NO: 5309 - DNA, 23 bp, Artificial sequence
  Primer
cgggactccacgtggagtcccga

SEQ ID NO: 5310 - DNA, 23 bp, Artificial sequence
  Primer
tgggactccacgtggagtcccag

SEQ ID NO: 5311 - DNA, 23 bp, Artificial sequence
  Primer
ctggactccacgtggagtccagg

SEQ ID NO: 5312 - DNA, 23 bp, Artificial sequence
  Primer
cgtgactccacgtggagtcacgg

SEQ ID NO: 5313 - DNA, 23 bp, Artificial sequence
  Primer
ggcgactccacgtggagtcgccg

SEQ ID NO: 5314 - DNA, 23 bp, Artificial sequence
  Primer
agcgactccacgtggagtcgctg

SEQ ID NO: 5315 - DNA, 23 bp, Artificial sequence
  Primer
gacgactccacgtggagtcgtcg

SEQ ID NO: 5316 - DNA, 23 bp, Artificial sequence
  Primer
ggagactccacgtggagtctccg

SEQ ID NO: 5317 - DNA, 23 bp, Artificial sequence
  Primer
tgcgactccacgtggagtcgcag

SEQ ID NO: 5318 - DNA, 23 bp, Artificial sequence
  Primer
ggtgactccacgtggagtcaccg

SEQ ID NO: 5319 - DNA, 23 bp, Artificial sequence
  Primer
acggactccacgtggagtccgtg

SEQ ID NO: 5320 - DNA, 23 bp, Artificial sequence
  Primer
ccagactccacgtggagtctggg

SEQ ID NO: 5321 - DNA, 23 bp, Artificial sequence
  Primer
tcggactccacgtggagtccgag

SEQ ID NO: 5322 - DNA, 23 bp, Artificial sequence
  Primer
cctgactccacgtggagtcaggg

SEQ ID NO: 5323 - DNA, 23 bp, Artificial sequence
  Primer
cacgactccacgtggagtcgtgg

SEQ ID NO: 5324 - DNA, 23 bp, Artificial sequence
  Primer
gccgactccacgtggagtcggct

SEQ ID NO: 5325 - DNA, 23 bp, Artificial sequence
  Primer
gccgactccacgtggagtcggca

SEQ ID NO: 5326 - DNA, 23 bp, Artificial sequence
  Primer
cgagactccacgtggagtctcgc

SEQ ID NO: 5327 - DNA, 23 bp, Artificial sequence
  Primer
cgtgactccacgtggagtcacgc

SEQ ID NO: 5328 - DNA, 23 bp, Artificial sequence
  Primer
caggactccacgtggagtcctgc

SEQ ID NO: 5329 - DNA, 23 bp, Artificial sequence
  Primer
ctggactccacgtggagtccagc

SEQ ID NO: 5330 - DNA, 23 bp, Artificial sequence
  Primer
gaggactccacgtggagtcctcg

SEQ ID NO: 5331 - DNA, 23 bp, Artificial sequence
  Primer
gtggactccacgtggagtccacg

SEQ ID NO: 5332 - DNA, 23 bp, Artificial sequence
  Primer
accgactccacgtggagtcggtg

SEQ ID NO: 5333 - DNA, 23 bp, Artificial sequence
  Primer
tccgactccacgtggagtcggag

SEQ ID NO: 5334 - DNA, 23 bp, Artificial sequence
  Primer
cgggactccacgtggagtcccgc

SEQ ID NO: 5335 - DNA, 23 bp, Artificial sequence
  Primer
agggactccacgtggagtccctc

SEQ ID NO: 5336 - DNA, 23 bp, Artificial sequence
  Primer
tgggactccacgtggagtcccac

SEQ ID NO: 5337 - DNA, 23 bp, Artificial sequence
  Primer
  misc_feature (1)..(3): n is a, c, g, or t
  misc_feature (20)..(23): n is a, c, g, or t
nnngactctcatgagagtcnnnn

SEQ ID NO: 5338 - DNA, 23 bp, Artificial sequence
  Primer
gcggactctcatgagagtccgcc

SEQ ID NO: 5339 - DNA, 23 bp, Artificial sequence
  Primer
gcggactctcatgagagtccgct

SEQ ID NO: 5340 - DNA, 23 bp, Artificial sequence
  Primer
acggactctcatgagagtccgtc

SEQ ID NO: 5341 - DNA, 23 bp, Artificial sequence
  Primer
gaggactctcatgagagtcctcc

SEQ ID NO: 5342 - DNA, 23 bp, Artificial sequence
  Primer
gcagactctcatgagagtctgcc

SEQ ID NO: 5343 - DNA, 23 bp, Artificial sequence
  Primer
gcggactctcatgagagtccgca

SEQ ID NO: 5344 - DNA, 23 bp, Artificial sequence
  Primer
tcggactctcatgagagtccgac

SEQ ID NO: 5345 - DNA, 23 bp, Artificial sequence
  Primer
gtggactctcatgagagtccacc

SEQ ID NO: 5346 - DNA, 23 bp, Artificial sequence
  Primer
gctgactctcatgagagtcagcc

SEQ ID NO: 5347 - DNA, 23 bp, Artificial sequence
  Primer
cccgactctcatgagagtcgggc

SEQ ID NO: 5348 - DNA, 23 bp, Artificial sequence
  Primer
cccgactctcatgagagtcgggt

SEQ ID NO: 5349 - DNA, 23 bp, Artificial sequence
  Primer
accgactctcatgagagtcggtc

SEQ ID NO: 5350 - DNA, 23 bp, Artificial sequence
  Primer
cacgactctcatgagagtcgtgc

SEQ ID NO: 5351 - DNA, 23 bp, Artificial sequence
  Primer
ccagactctcatgagagtctggc

SEQ ID NO: 5352 - DNA, 23 bp, Artificial sequence
  Primer
cccgactctcatgagagtcggga

SEQ ID NO: 5353 - DNA, 23 bp, Artificial sequence
  Primer
tccgactctcatgagagtcggac

SEQ ID NO: 5354 - DNA, 23 bp, Artificial sequence
  Primer
cctgactctcatgagagtcaggc

SEQ ID NO: 5355 - DNA, 23 bp, Artificial sequence
  Primer
ggcgactctcatgagagtcgccc

SEQ ID NO: 5356 - DNA, 23 bp, Artificial sequence
  Primer
ggcgactctcatgagagtcgcct

SEQ ID NO: 5357 - DNA, 23 bp, Artificial sequence
  Primer
agcgactctcatgagagtcgctc

SEQ ID NO: 5358 - DNA, 23 bp, Artificial sequence
  Primer
gacgactctcatgagagtcgtcc

SEQ ID NO: 5359 - DNA, 23 bp, Artificial sequence
  Primer
ggagactctcatgagagtctccc

SEQ ID NO: 5360 - DNA, 23 bp, Artificial sequence
  Primer
ggcgactctcatgagagtcgcca

SEQ ID NO: 5361 - DNA, 23 bp, Artificial sequence
  Primer
tgcgactctcatgagagtcgcac

SEQ ID NO: 5362 - DNA, 23 bp, Artificial sequence
  Primer
ggtgactctcatgagagtcaccc

SEQ ID NO: 5363 - DNA, 23 bp, Artificial sequence
  Primer
cgggactctcatgagagtcccgt

SEQ ID NO: 5364 - DNA, 23 bp, Artificial sequence
  Primer
agggactctcatgagagtccctg

SEQ ID NO: 5365 - DNA, 23 bp, Artificial sequence
  Primer
caggactctcatgagagtcctgg

SEQ ID NO: 5366 - DNA, 23 bp, Artificial sequence
  Primer
cgagactctcatgagagtctcgg

SEQ ID NO: 5367 - DNA, 23 bp, Artificial sequence
  Primer
cgggactctcatgagagtcccga

SEQ ID NO: 5368 - DNA, 23 bp, Artificial sequence
  Primer
tgggactctcatgagagtcccag

SEQ ID NO: 5369 - DNA, 23 bp, Artificial sequence
  Primer
ctggactctcatgagagtccagg

SEQ ID NO: 5370 - DNA, 23 bp, Artificial sequence
  Primer
cgtgactctcatgagagtcacgg

SEQ ID NO: 5371 - DNA, 23 bp, Artificial sequence
  Primer
ggcgactctcatgagagtcgccg

SEQ ID NO: 5372 - DNA, 23 bp, Artificial sequence
  Primer
agcgactctcatgagagtcgctg

SEQ ID NO: 5373 - DNA, 23 bp, Artificial sequence
  Primer
gacgactctcatgagagtcgtcg

SEQ ID NO: 5374 - DNA, 23 bp, Artificial sequence
  Primer
ggagactctcatgagagtctccg

SEQ ID NO: 5375 - DNA, 23 bp, Artificial sequence
  Primer
tgcgactctcatgagagtcgcag

SEQ ID NO: 5376 - DNA, 23 bp, Artificial sequence
  Primer
ggtgactctcatgagagtcaccg

SEQ ID NO: 5377 - DNA, 23 bp, Artificial sequence
  Primer
acggactctcatgagagtccgtg

SEQ ID NO: 5378 - DNA, 23 bp, Artificial sequence
  Primer
ccagactctcatgagagtctggg

SEQ ID NO: 5379 - DNA, 23 bp, Artificial sequence
  Primer
tcggactctcatgagagtccgag

SEQ ID NO: 5380 - DNA, 23 bp, Artificial sequence
  Primer
cctgactctcatgagagtcaggg

SEQ ID NO: 5381 - DNA, 23 bp, Artificial sequence
  Primer
cacgactctcatgagagtcgtgg

SEQ ID NO: 5382 - DNA, 23 bp, Artificial sequence
  Primer
gccgactctcatgagagtcggct

SEQ ID NO: 5383 - DNA, 23 bp, Artificial sequence
  Primer
gccgactctcatgagagtcggca

SEQ ID NO: 5384 - DNA, 23 bp, Artificial sequence
  Primer
cgagactctcatgagagtctcgc

SEQ ID NO: 5385 - DNA, 23 bp, Artificial sequence
  Primer
cgtgactctcatgagagtcacgc

SEQ ID NO: 5386 - DNA, 23 bp, Artificial sequence
  Primer
caggactctcatgagagtcctgc

SEQ ID NO: 5387 - DNA, 23 bp, Artificial sequence
  Primer
ctggactctcatgagagtccagc

SEQ ID NO: 5388 - DNA, 23 bp, Artificial sequence
  Primer
gaggactctcatgagagtcctcg

SEQ ID NO: 5389 - DNA, 23 bp, Artificial sequence
  Primer
gtggactctcatgagagtccacg

SEQ ID NO: 5390 - DNA, 23 bp, Artificial sequence
  Primer
accgactctcatgagagtcggtg

SEQ ID NO: 5391 - DNA, 23 bp, Artificial sequence
  Primer
tccgactctcatgagagtcggag

SEQ ID NO: 5392 - DNA, 23 bp, Artificial sequence
  Primer
cgggactctcatgagagtcccgc

SEQ ID NO: 5393 - DNA, 23 bp, Artificial sequence
  Primer
agggactctcatgagagtccctc

SEQ ID NO: 5394 - DNA, 23 bp, Artificial sequence
  Primer
tgggactctcatgagagtcccac

SEQ ID NO: 5395 - DNA, 23 bp, Artificial sequence
  Primer
  misc_feature (1)..(3): n is a, c, g, or t
  misc_feature (20)..(23): n is a, c, g, or t
nnngactctctagagagtcnnnn

SEQ ID NO: 5396 - DNA, 23 bp, Artificial sequence
  Primer
gcggactctctagagagtccgcc

SEQ ID NO: 5397 - DNA, 23 bp, Artificial sequence
  Primer
gcggactctctagagagtccgct

SEQ ID NO: 5398 - DNA, 23 bp, Artificial sequence
  Primer
acggactctctagagagtccgtc

SEQ ID NO: 5399 - DNA, 23 bp, Artificial sequence
  Primer
gaggactctctagagagtcctcc

SEQ ID NO: 5400 - DNA, 23 bp, Artificial sequence
  Primer
gcagactctctagagagtctgcc

SEQ ID NO: 5401 - DNA, 23 bp, Artificial sequence
  Primer
gcggactctctagagagtccgca

SEQ ID NO: 5402 - DNA, 23 bp, Artificial sequence
  Primer
tcggactctctagagagtccgac

SEQ ID NO: 5403 - DNA, 23 bp, Artificial sequence
  Primer
gtggactctctagagagtccacc

SEQ ID NO: 5404 - DNA, 23 bp, Artificial sequence
  Primer
gctgactctctagagagtcagcc

SEQ ID NO: 5405 - DNA, 23 bp, Artificial sequence
  Primer
cccgactctctagagagtcgggc

SEQ ID NO: 5406 - DNA, 23 bp, Artificial sequence
  Primer
cccgactctctagagagtcgggt

SEQ ID NO: 5407 - DNA, 23 bp, Artificial sequence
  Primer
accgactctctagagagtcggtc

SEQ ID NO: 5408 - DNA, 23 bp, Artificial sequence
  Primer
cacgactctctagagagtcgtgc

SEQ ID NO: 5409 - DNA, 23 bp, Artificial sequence
  Primer
ccagactctctagagagtctggc

SEQ ID NO: 5410 - DNA, 23 bp, Artificial sequence
  Primer
cccgactctctagagagtcggga

SEQ ID NO: 5411 - DNA, 23 bp, Artificial sequence
  Primer
tccgactctctagagagtcggac

SEQ ID NO: 5412 - DNA, 23 bp, Artificial sequence
  Primer
cctgactctctagagagtcaggc

SEQ ID NO: 5413 - DNA, 23 bp, Artificial sequence
  Primer
ggcgactctctagagagtcgccc

SEQ ID NO: 5414 - DNA, 23 bp, Artificial sequence
  Primer
ggcgactctctagagagtcgcct

SEQ ID NO: 5415 - DNA, 23 bp, Artificial sequence
  Primer
agcgactctctagagagtcgctc

SEQ ID NO: 5416 - DNA, 23 bp, Artificial sequence
  Primer
gacgactctctagagagtcgtcc

SEQ ID NO: 5417 - DNA, 23 bp, Artificial sequence
  Primer
ggagactctctagagagtctccc

SEQ ID NO: 5418 - DNA, 23 bp, Artificial sequence
  Primer
ggcgactctctagagagtcgcca

SEQ ID NO: 5419 - DNA, 23 bp, Artificial sequence
  Primer
tgcgactctctagagagtcgcac

SEQ ID NO: 5420 - DNA, 23 bp, Artificial sequence
  Primer
ggtgactctctagagagtcaccc

SEQ ID NO: 5421 - DNA, 23 bp, Artificial sequence
  Primer
cgggactctctagagagtcccgt

SEQ ID NO: 5422 - DNA, 23 bp, Artificial sequence
  Primer
agggactctctagagagtccctg

SEQ ID NO: 5423 - DNA, 23 bp, Artificial sequence
  Primer
caggactctctagagagtcctgg

SEQ ID NO: 5424 - DNA, 23 bp, Artificial sequence
  Primer
cgagactctctagagagtctcgg

SEQ ID NO: 5425 - DNA, 23 bp, Artificial sequence
  Primer
cgggactctctagagagtcccga

SEQ ID NO: 5426 - DNA, 23 bp, Artificial sequence
  Primer
tgggactctctagagagtcccag

SEQ ID NO: 5427 - DNA, 23 bp, Artificial sequence
  Primer
ctggactctctagagagtccagg

SEQ ID NO: 5428 - DNA, 23 bp, Artificial sequence
  Primer
cgtgactctctagagagtcacgg

SEQ ID NO: 5429 - DNA, 23 bp, Artificial sequence
  Primer
ggcgactctctagagagtcgccg

SEQ ID NO: 5430 - DNA, 23 bp, Artificial sequence
  Primer
agcgactctctagagagtcgctg

SEQ ID NO: 5431 - DNA, 23 bp, Artificial sequence
  Primer
gacgactctctagagagtcgtcg

SEQ ID NO: 5432 - DNA, 23 bp, Artificial sequence
  Primer
ggagactctctagagagtctccg

SEQ ID NO: 5433 - DNA, 23 bp, Artificial sequence
  Primer
tgcgactctctagagagtcgcag

SEQ ID NO: 5434 - DNA, 23 bp, Artificial sequence
  Primer
ggtgactctctagagagtcaccg

SEQ ID NO: 5435 - DNA, 23 bp, Artificial sequence
  Primer
acggactctctagagagtccgtg

SEQ ID NO: 5436 - DNA, 23 bp, Artificial sequence
  Primer
ccagactctctagagagtctggg

SEQ ID NO: 5437 - DNA, 23 bp, Artificial sequence
  Primer
tcggactctctagagagtccgag

SEQ ID NO: 5438 - DNA, 23 bp, Artificial sequence
  Primer
cctgactctctagagagtcaggg

SEQ ID NO: 5439 - DNA, 23 bp, Artificial sequence
  Primer
cacgactctctagagagtcgtgg

SEQ ID NO: 5440 - DNA, 23 bp, Artificial sequence
  Primer
gccgactctctagagagtcggct

SEQ ID NO: 5441 - DNA, 23 bp, Artificial sequence
  Primer
gccgactctctagagagtcggca

SEQ ID NO: 5442 - DNA, 23 bp, Artificial sequence
  Primer
cgagactctctagagagtctcgc

SEQ ID NO: 5443 - DNA, 23 bp, Artificial sequence
  Primer
cgtgactctctagagagtcacgc

SEQ ID NO: 5444 - DNA, 23 bp, Artificial sequence
  Primer
caggactctctagagagtcctgc

SEQ ID NO: 5445 - DNA, 23 bp, Artificial sequence
  Primer
ctggactctctagagagtccagc

SEQ ID NO: 5446 - DNA, 23 bp, Artificial sequence
  Primer
gaggactctctagagagtcctcg

SEQ ID NO: 5447 - DNA, 23 bp, Artificial sequence
  Primer
gtggactctctagagagtccacg

SEQ ID NO: 5448 - DNA, 23 bp, Artificial sequence
  Primer
accgactctctagagagtcggtg

SEQ ID NO: 5449 - DNA, 23 bp, Artificial sequence
  Primer
tccgactctctagagagtcggag

SEQ ID NO: 5450 - DNA, 23 bp, Artificial sequence
  Primer
cgggactctctagagagtcccgc

SEQ ID NO: 5451 - DNA, 23 bp, Artificial sequence
  Primer
agggactctctagagagtccctc

SEQ ID NO: 5452 - DNA, 23 bp, Artificial sequence
  Primer
tgggactctctagagagtcccac

SEQ ID NO: 5453 - DNA, 23 bp, Artificial sequence
  Primer
  misc_feature (1)..(3): n is a, c, g, or t
  misc_feature (20)..(23): n is a, c, g, or t
nnngactctcgcgagagtcnnnn

SEQ ID NO: 5454 - DNA, 23 bp, Artificial sequence
  Primer
gcggactctcgcgagagtccgcc

SEQ ID NO: 5455 - DNA, 23 bp, Artificial sequence
  Primer
gcggactctcgcgagagtccgct

SEQ ID NO: 5456 - DNA, 23 bp, Artificial sequence
  Primer
acggactctcgcgagagtccgtc

SEQ ID NO: 5457 - DNA, 23 bp, Artificial sequence
  Primer
gaggactctcgcgagagtcctcc

SEQ ID NO: 5458 - DNA, 23 bp, Artificial sequence
  Primer
gcagactctcgcgagagtctgcc

SEQ ID NO: 5459 - DNA, 23 bp, Artificial sequence
  Primer
gcggactctcgcgagagtccgca

SEQ ID NO: 5460 - DNA, 23 bp, Artificial sequence
  Primer
tcggactctcgcgagagtccgac

SEQ ID NO: 5461 - DNA, 23 bp, Artificial sequence
  Primer
gtggactctcgcgagagtccacc

SEQ ID NO: 5462 - DNA, 23 bp, Artificial sequence
  Primer
gctgactctcgcgagagtcagcc

SEQ ID NO: 5463 - DNA, 23 bp, Artificial sequence
  Primer
cccgactctcgcgagagtcgggc

SEQ ID NO: 5464 - DNA, 23 bp, Artificial sequence
  Primer
cccgactctcgcgagagtcgggt

SEQ ID NO: 5465 - DNA, 23 bp, Artificial sequence
  Primer
accgactctcgcgagagtcggtc

SEQ ID NO: 5466 - DNA, 23 bp, Artificial sequence
  Primer
cacgactctcgcgagagtcgtgc

SEQ ID NO: 5467 - DNA, 23 bp, Artificial sequence
  Primer
ccagactctcgcgagagtctggc

SEQ ID NO: 5468 - DNA, 23 bp, Artificial sequence
  Primer
cccgactctcgcgagagtcggga

SEQ ID NO: 5469 - DNA, 23 bp, Artificial sequence
  Primer
tccgactctcgcgagagtcggac

SEQ ID NO: 5470 - DNA, 23 bp, Artificial sequence
  Primer
cctgactctcgcgagagtcaggc

SEQ ID NO: 5471 - DNA, 23 bp, Artificial sequence
  Primer
ggcgactctcgcgagagtcgccc

SEQ ID NO: 5472 - DNA, 23 bp, Artificial sequence
  Primer
ggcgactctcgcgagagtcgcct

SEQ ID NO: 5473 - DNA, 23 bp, Artificial sequence
  Primer
agcgactctcgcgagagtcgctc

SEQ ID NO: 5474 - DNA, 23 bp, Artificial sequence
  Primer
gacgactctcgcgagagtcgtcc

SEQ ID NO: 5475 - DNA, 23 bp, Artificial sequence
  Primer
ggagactctcgcgagagtctccc

SEQ ID NO: 5476 - DNA, 23 bp, Artificial sequence
  Primer
ggcgactctcgcgagagtcgcca

SEQ ID NO: 5477 - DNA, 23 bp, Artificial sequence
  Primer
tgcgactctcgcgagagtcgcac

SEQ ID NO: 5478 - DNA, 23 bp, Artificial sequence
  Primer
ggtgactctcgcgagagtcaccc

SEQ ID NO: 5479 - DNA, 23 bp, Artificial sequence
  Primer
cgggactctcgcgagagtcccgt

SEQ ID NO: 5480 - DNA, 23 bp, Artificial sequence
  Primer
agggactctcgcgagagtccctg

SEQ ID NO: 5481 - DNA, 23 bp, Artificial sequence
  Primer
caggactctcgcgagagtcctgg

SEQ ID NO: 5482 - DNA, 23 bp, Artificial sequence
  Primer
cgagactctcgcgagagtctcgg

SEQ ID NO: 5483 - DNA, 23 bp, Artificial sequence
  Primer
cgggactctcgcgagagtcccga

SEQ ID NO: 5484 - DNA, 23 bp, Artificial sequence
  Primer
tgggactctcgcgagagtcccag

SEQ ID NO: 5485 - DNA, 23 bp, Artificial sequence
  Primer
ctggactctcgcgagagtccagg

SEQ ID NO: 5486 - DNA, 23 bp, Artificial sequence
  Primer
cgtgactctcgcgagagtcacgg

SEQ ID NO: 5487 - DNA, 23 bp, Artificial sequence
  Primer
ggcgactctcgcgagagtcgccg

SEQ ID NO: 5488 - DNA, 23 bp, Artificial sequence
  Primer
agcgactctcgcgagagtcgctg

SEQ ID NO: 5489 - DNA, 23 bp, Artificial sequence
  Primer
gacgactctcgcgagagtcgtcg

SEQ ID NO: 5490 - DNA, 23 bp, Artificial sequence
  Primer
ggagactctcgcgagagtctccg

SEQ ID NO: 5491 - DNA, 23 bp, Artificial sequence
  Primer
tgcgactctcgcgagagtcgcag

SEQ ID NO: 5492 - DNA, 23 bp, Artificial sequence
  Primer
ggtgactctcgcgagagtcaccg

SEQ ID NO: 5493 - DNA, 23 bp, Artificial sequence
  Primer
acggactctcgcgagagtccgtg

SEQ ID NO: 5494 - DNA, 23 bp, Artificial sequence
  Primer
ccagactctcgcgagagtctggg

SEQ ID NO: 5495 - DNA, 23 bp, Artificial sequence
  Primer
tcggactctcgcgagagtccgag

SEQ ID NO: 5496 - DNA, 23 bp, Artificial sequence
  Primer
cctgactctcgcgagagtcaggg

SEQ ID NO: 5497 - DNA, 23 bp, Artificial sequence
  Primer
cacgactctcgcgagagtcgtgg

SEQ ID NO: 5498 - DNA, 23 bp, Artificial sequence
  Primer
gccgactctcgcgagagtcggct

SEQ ID NO: 5499 - DNA, 23 bp, Artificial sequence
  Primer
gccgactctcgcgagagtcggca

SEQ ID NO: 5500 - DNA, 23 bp, Artificial sequence
  Primer
cgagactctcgcgagagtctcgc

SEQ ID NO: 5501 - DNA, 23 bp, Artificial sequence
  Primer
cgtgactctcgcgagagtcacgc

SEQ ID NO: 5502 - DNA, 23 bp, Artificial sequence
  Primer
caggactctcgcgagagtcctgc

SEQ ID NO: 5503 - DNA, 23 bp, Artificial sequence
  Primer
ctggactctcgcgagagtccagc

SEQ ID NO: 5504 - DNA, 23 bp, Artificial sequence
  Primer
gaggactctcgcgagagtcctcg

SEQ ID NO: 5505 - DNA, 23 bp, Artificial sequence
  Primer
gtggactctcgcgagagtccacg

SEQ ID NO: 5506 - DNA, 23 bp, Artificial sequence
  Primer
accgactctcgcgagagtcggtg

SEQ ID NO: 5507 - DNA, 23 bp, Artificial sequence
  Primer
tccgactctcgcgagagtcggag

SEQ ID NO: 5508 - DNA, 23 bp, Artificial sequence
  Primer
cgggactctcgcgagagtcccgc

SEQ ID NO: 5509 - DNA, 23 bp, Artificial sequence
  Primer
agggactctcgcgagagtccctc

SEQ ID NO: 5510 - DNA, 23 bp, Artificial sequence
  Primer
tgggactctcgcgagagtcccac

SEQ ID NO: 5511 - DNA, 23 bp, Artificial sequence
  Primer
  misc_feature (1)..(3): n is a, c, g, or t
  misc_feature (20)..(23): n is a, c, g, or t
nnngactctccggagagtcnnnn

SEQ ID NO: 5512 - DNA, 23 bp, Artificial sequence
  Primer
gcggactctccggagagtccgcc

SEQ ID NO: 5513 - DNA, 23 bp, Artificial sequence
  Primer
gcggactctccggagagtccgct

SEQ ID NO: 5514 - DNA, 23 bp, Artificial sequence
  Primer
acggactctccggagagtccgtc

SEQ ID NO: 5515 - DNA, 23 bp, Artificial sequence
  Primer
gaggactctccggagagtcctcc

SEQ ID NO: 5516 - DNA, 23 bp, Artificial sequence
  Primer
gcagactctccggagagtctgcc

SEQ ID NO: 5517 - DNA, 23 bp, Artificial sequence
  Primer
gcggactctccggagagtccgca

SEQ ID NO: 5518 - DNA, 23 bp, Artificial sequence
  Primer
tcggactctccggagagtccgac

SEQ ID NO: 5519 - DNA, 23 bp, Artificial sequence
  Primer
gtggactctccggagagtccacc

SEQ ID NO: 5520 - DNA, 23 bp, Artificial sequence
  Primer
gctgactctccggagagtcagcc

SEQ ID NO: 5521 - DNA, 23 bp, Artificial sequence
  Primer
cccgactctccggagagtcgggc

SEQ ID NO: 5522 - DNA, 23 bp, Artificial sequence
  Primer
cccgactctccggagagtcgggt

SEQ ID NO: 5523 - DNA, 23 bp, Artificial sequence
  Primer
accgactctccggagagtcggtc

SEQ ID NO: 5524 - DNA, 23 bp, Artificial sequence
  Primer
cacgactctccggagagtcgtgc

SEQ ID NO: 5525 - DNA, 23 bp, Artificial sequence
  Primer
ccagactctccggagagtctggc

SEQ ID NO: 5526 - DNA, 23 bp, Artificial sequence
  Primer
cccgactctccggagagtcggga

SEQ ID NO: 5527 - DNA, 23 bp, Artificial sequence
  Primer
tccgactctccggagagtcggac

SEQ ID NO: 5528 - DNA, 23 bp, Artificial sequence
  Primer
cctgactctccggagagtcaggc

SEQ ID NO: 5529 - DNA, 23 bp, Artificial sequence
  Primer
ggcgactctccggagagtcgccc

SEQ ID NO: 5530 - DNA, 23 bp, Artificial sequence
  Primer
ggcgactctccggagagtcgcct

SEQ ID NO: 5531 - DNA, 23 bp, Artificial sequence
  Primer
agcgactctccggagagtcgctc

SEQ ID NO: 5532 - DNA, 23 bp, Artificial sequence
  Primer
gacgactctccggagagtcgtcc

SEQ ID NO: 5533 - DNA, 23 bp, Artificial sequence
  Primer
ggagactctccggagagtctccc

SEQ ID NO: 5534 - DNA, 23 bp, Artificial sequence
  Primer
ggcgactctccggagagtcgcca

SEQ ID NO: 5535 - DNA, 23 bp, Artificial sequence
  Primer
tgcgactctccggagagtcgcac

SEQ ID NO: 5536 - DNA, 23 bp, Artificial sequence
  Primer
ggtgactctccggagagtcaccc

SEQ ID NO: 5537 - DNA, 23 bp, Artificial sequence
  Primer
cgggactctccggagagtcccgt

SEQ ID NO: 5538 - DNA, 23 bp, Artificial sequence
  Primer
agggactctccggagagtccctg

SEQ ID NO: 5539 - DNA, 23 bp, Artificial sequence
  Primer
caggactctccggagagtcctgg

SEQ ID NO: 5540 - DNA, 23 bp, Artificial sequence
  Primer
cgagactctccggagagtctcgg

SEQ ID NO: 5541 - DNA, 23 bp, Artificial sequence
  Primer
cgggactctccggagagtcccga

SEQ ID NO: 5542 - DNA, 23 bp, Artificial sequence
  Primer
tgggactctccggagagtcccag

SEQ ID NO: 5543 - DNA, 23 bp, Artificial sequence
  Primer
ctggactctccggagagtccagg

SEQ ID NO: 5544 - DNA, 23 bp, Artificial sequence
  Primer
cgtgactctccggagagtcacgg

SEQ ID NO: 5545 - DNA, 23 bp, Artificial sequence
  Primer
ggcgactctccggagagtcgccg

SEQ ID NO: 5546 - DNA, 23 bp, Artificial sequence
  Primer
agcgactctccggagagtcgctg

SEQ ID NO: 5547 - DNA, 23 bp, Artificial sequence
  Primer
gacgactctccggagagtcgtcg

SEQ ID NO: 5548 - DNA, 23 bp, Artificial sequence
  Primer
ggagactctccggagagtctccg

SEQ ID NO: 5549 - DNA, 23 bp, Artificial sequence
  Primer
tgcgactctccggagagtcgcag

SEQ ID NO: 5550 - DNA, 23 bp, Artificial sequence
  Primer
ggtgactctccggagagtcaccg

SEQ ID NO: 5551 - DNA, 23 bp, Artificial sequence
  Primer
acggactctccggagagtccgtg

SEQ ID NO: 5552 - DNA, 23 bp, Artificial sequence
  Primer
ccagactctccggagagtctggg

SEQ ID NO: 5553 - DNA, 23 bp, Artificial sequence
  Primer
tcggactctccggagagtccgag

SEQ ID NO: 5554 - DNA, 23 bp, Artificial sequence
  Primer
cctgactctccggagagtcaggg

SEQ ID NO: 5555 - DNA, 23 bp, Artificial sequence
  Primer
cacgactctccggagagtcgtgg

SEQ ID NO: 5556 - DNA, 23 bp, Artificial sequence
  Primer
gccgactctccggagagtcggct

SEQ ID NO: 5557 - DNA, 23 bp, Artificial sequence
  Primer
gccgactctccggagagtcggca

SEQ ID NO: 5558 - DNA, 23 bp, Artificial sequence
  Primer
cgagactctccggagagtctcgc

SEQ ID NO: 5559 - DNA, 23 bp, Artificial sequence
  Primer
cgtgactctccggagagtcacgc

SEQ ID NO: 5560 - DNA, 23 bp, Artificial sequence
  Primer
caggactctccggagagtcctgc

SEQ ID NO: 5561 - DNA, 23 bp, Artificial sequence
  Primer
ctggactctccggagagtccagc

SEQ ID NO: 5562 - DNA, 23 bp, Artificial sequence
  Primer
gaggactctccggagagtcctcg

SEQ ID NO: 5563 - DNA, 23 bp, Artificial sequence
  Primer
gtggactctccggagagtccacg

SEQ ID NO: 5564 - DNA, 23 bp, Artificial sequence
  Primer
accgactctccggagagtcggtg

SEQ ID NO: 5565 - DNA, 23 bp, Artificial sequence
  Primer
tccgactctccggagagtcggag

SEQ ID NO: 5566 - DNA, 23 bp, Artificial sequence
  Primer
cgggactctccggagagtcccgc

SEQ ID NO: 5567 - DNA, 23 bp, Artificial sequence
  Primer
agggactctccggagagtccctc

SEQ ID NO: 5568 - DNA, 23 bp, Artificial sequence
  Primer
tgggactctccggagagtcccac

SEQ ID NO: 5569 - DNA, 23 bp, Artificial sequence
  Primer
  misc_feature (1)..(3): n is a, c, g, or t
  misc_feature (20)..(23): n is a, c, g, or t
nnngactcagatctgagtcnnnn

SEQ ID NO: 5570 - DNA, 23 bp, Artificial sequence
  Primer
gcggactcagatctgagtccgcc

SEQ ID NO: 5571 - DNA, 23 bp, Artificial sequence
  Primer
gcggactcagatctgagtccgct

SEQ ID NO: 5572 - DNA, 23 bp, Artificial sequence
  Primer
acggactcagatctgagtccgtc

SEQ ID NO: 5573 - DNA, 23 bp, Artificial sequence
  Primer
gaggactcagatctgagtcctcc

SEQ ID NO: 5574 - DNA, 23 bp, Artificial sequence
  Primer
gcagactcagatctgagtctgcc

SEQ ID NO: 5575 - DNA, 23 bp, Artificial sequence
  Primer
gcggactcagatctgagtccgca

SEQ ID NO: 5576 - DNA, 23 bp, Artificial sequence
  Primer
tcggactcagatctgagtccgac

SEQ ID NO: 5577 - DNA, 23 bp, Artificial sequence
  Primer
gtggactcagatctgagtccacc

SEQ ID NO: 5578 - DNA, 23 bp, Artificial sequence
  Primer
gctgactcagatctgagtcagcc

SEQ ID NO: 5579 - DNA, 23 bp, Artificial sequence
  Primer
cccgactcagatctgagtcgggc

SEQ ID NO: 5580 - DNA, 23 bp, Artificial sequence
  Primer
cccgactcagatctgagtcgggt

SEQ ID NO: 5581 - DNA, 23 bp, Artificial sequence
  Primer
accgactcagatctgagtcggtc

SEQ ID NO: 5582 - DNA, 23 bp, Artificial sequence
  Primer
cacgactcagatctgagtcgtgc

SEQ ID NO: 5583 - DNA, 23 bp, Artificial sequence
  Primer
ccagactcagatctgagtctggc

SEQ ID NO: 5584 - DNA, 23 bp, Artificial sequence
  Primer
cccgactcagatctgagtcggga

SEQ ID NO: 5585 - DNA, 23 bp, Artificial sequence
  Primer
tccgactcagatctgagtcggac

SEQ ID NO: 5586 - DNA, 23 bp, Artificial sequence
  Primer
cctgactcagatctgagtcaggc

SEQ ID NO: 5587 - DNA, 23 bp, Artificial sequence
  Primer
ggcgactcagatctgagtcgccc

SEQ ID NO: 5588 - DNA, 23 bp, Artificial sequence
  Primer
ggcgactcagatctgagtcgcct

SEQ ID NO: 5589 - DNA, 23 bp, Artificial sequence
  Primer
agcgactcagatctgagtcgctc

SEQ ID NO: 5590 - DNA, 23 bp, Artificial sequence
  Primer
gacgactcagatctgagtcgtcc

SEQ ID NO: 5591 - DNA, 23 bp, Artificial sequence
  Primer
ggagactcagatctgagtctccc

SEQ ID NO: 5592 - DNA, 23 bp, Artificial sequence
  Primer
ggcgactcagatctgagtcgcca

SEQ ID NO: 5593 - DNA, 23 bp, Artificial sequence
  Primer
tgcgactcagatctgagtcgcac

SEQ ID NO: 5594 - DNA, 23 bp, Artificial sequence
  Primer
ggtgactcagatctgagtcaccc

SEQ ID NO: 5595 - DNA, 23 bp, Artificial sequence
  Primer
cgggactcagatctgagtcccgt

SEQ ID NO: 5596 - DNA, 23 bp, Artificial sequence
  Primer
agggactcagatctgagtccctg

SEQ ID NO: 5597 - DNA, 23 bp, Artificial sequence
  Primer
caggactcagatctgagtcctgg

SEQ ID NO: 5598 - DNA, 23 bp, Artificial sequence
  Primer
cgagactcagatctgagtctcgg

SEQ ID NO: 5599 - DNA, 23 bp, Artificial sequence
  Primer
cgggactcagatctgagtcccga

SEQ ID NO: 5600 - DNA, 23 bp, Artificial sequence
  Primer
tgggactcagatctgagtcccag

SEQ ID NO: 5601 - DNA, 23 bp, Artificial sequence
  Primer
ctggactcagatctgagtccagg

SEQ ID NO: 5602 - DNA, 23 bp, Artificial sequence
  Primer
cgtgactcagatctgagtcacgg

SEQ ID NO: 5603 - DNA, 23 bp, Artificial sequence
  Primer
ggcgactcagatctgagtcgccg

SEQ ID NO: 5604 - DNA, 23 bp, Artificial sequence
  Primer
agcgactcagatctgagtcgctg

SEQ ID NO: 5605 - DNA, 23 bp, Artificial sequence
  Primer
gacgactcagatctgagtcgtcg

SEQ ID NO: 5606 - DNA, 23 bp, Artificial sequence
  Primer
ggagactcagatctgagtctccg

SEQ ID NO: 5607 - DNA, 23 bp, Artificial sequence
  Primer
tgcgactcagatctgagtcgcag

SEQ ID NO: 5608 - DNA, 23 bp, Artificial sequence
  Primer
ggtgactcagatctgagtcaccg

SEQ ID NO: 5609 - DNA, 23 bp, Artificial sequence
  Primer
acggactcagatctgagtccgtg

SEQ ID NO: 5610 - DNA, 23 bp, Artificial sequence
  Primer
ccagactcagatctgagtctggg

SEQ ID NO: 5611 - DNA, 23 bp, Artificial sequence
  Primer
tcggactcagatctgagtccgag

SEQ ID NO: 5612 - DNA, 23 bp, Artificial sequence
  Primer
cctgactcagatctgagtcaggg

SEQ ID NO: 5613 - DNA, 23 bp, Artificial sequence
  Primer
cacgactcagatctgagtcgtgg

SEQ ID NO: 5614 - DNA, 23 bp, Artificial sequence
  Primer
gccgactcagatctgagtcggct

SEQ ID NO: 5615 - DNA, 23 bp, Artificial sequence
  Primer
gccgactcagatctgagtcggca

SEQ ID NO: 5616 - DNA, 23 bp, Artificial sequence
  Primer
cgagactcagatctgagtctcgc

SEQ ID NO: 5617 - DNA, 23 bp, Artificial sequence
  Primer
cgtgactcagatctgagtcacgc

SEQ ID NO: 5618 - DNA, 23 bp, Artificial sequence
  Primer
caggactcagatctgagtcctgc

SEQ ID NO: 5619 - DNA, 23 bp, Artificial sequence
  Primer
ctggactcagatctgagtccagc

SEQ ID NO: 5620 - DNA, 23 bp, Artificial sequence
  Primer
gaggactcagatctgagtcctcg

SEQ ID NO: 5621 - DNA, 23 bp, Artificial sequence
  Primer
gtggactcagatctgagtccacg

SEQ ID NO: 5622 - DNA, 23 bp, Artificial sequence
  Primer
accgactcagatctgagtcggtg

SEQ ID NO: 5623 - DNA, 23 bp, Artificial sequence
  Primer
tccgactcagatctgagtcggag

SEQ ID NO: 5624 - DNA, 23 bp, Artificial sequence
  Primer
cgggactcagatctgagtcccgc

SEQ ID NO: 5625 - DNA, 23 bp, Artificial sequence
  Primer
agggactcagatctgagtccctc

SEQ ID NO: 5626 - DNA, 23 bp, Artificial sequence
  Primer
tgggactcagatctgagtcccac

SEQ ID NO: 5627 - DNA, 23 bp, Artificial sequence
  Primer
  misc_feature (1)..(3): n is a, c, g, or t
  misc_feature (20)..(23): n is a, c, g, or t
nnngactcagtactgagtcnnnn

SEQ ID NO: 5628 - DNA, 23 bp, Artificial sequence
  Primer
gcggactcagtactgagtccgcc

SEQ ID NO: 5629 - DNA, 23 bp, Artificial sequence
  Primer
gcggactcagtactgagtccgct

SEQ ID NO: 5630 - DNA, 23 bp, Artificial sequence
  Primer
acggactcagtactgagtccgtc

SEQ ID NO: 5631 - DNA, 23 bp, Artificial sequence
  Primer
gaggactcagtactgagtcctcc

SEQ ID NO: 5632 - DNA, 23 bp, Artificial sequence
  Primer
gcagactcagtactgagtctgcc

SEQ ID NO: 5633 - DNA, 23 bp, Artificial sequence
  Primer
gcggactcagtactgagtccgca

SEQ ID NO: 5634 - DNA, 23 bp, Artificial sequence
  Primer
tcggactcagtactgagtccgac

SEQ ID NO: 5635 - DNA, 23 bp, Artificial sequence
  Primer
gtggactcagtactgagtccacc

SEQ ID NO: 5636 - DNA, 23 bp, Artificial sequence
  Primer
gctgactcagtactgagtcagcc

SEQ ID NO: 5637 - DNA, 23 bp, Artificial sequence
  Primer
cccgactcagtactgagtcgggc

SEQ ID NO: 5638 - DNA, 23 bp, Artificial sequence
  Primer
cccgactcagtactgagtcgggt

SEQ ID NO: 5639 - DNA, 23 bp, Artificial sequence
  Primer
accgactcagtactgagtcggtc

SEQ ID NO: 5640 - DNA, 23 bp, Artificial sequence
  Primer
cacgactcagtactgagtcgtgc

SEQ ID NO: 5641 - DNA, 23 bp, Artificial sequence
  Primer
ccagactcagtactgagtctggc

SEQ ID NO: 5642 - DNA, 23 bp, Artificial sequence
  Primer
cccgactcagtactgagtcggga

SEQ ID NO: 5643 - DNA, 23 bp, Artificial sequence
  Primer
tccgactcagtactgagtcggac

SEQ ID NO: 5644 - DNA, 23 bp, Artificial sequence
  Primer
cctgactcagtactgagtcaggc

SEQ ID NO: 5645 - DNA, 23 bp, Artificial sequence
  Primer
ggcgactcagtactgagtcgccc

SEQ ID NO: 5646 - DNA, 23 bp, Artificial sequence
  Primer
ggcgactcagtactgagtcgcct

SEQ ID NO: 5647 - DNA, 23 bp, Artificial sequence
  Primer
agcgactcagtactgagtcgctc

SEQ ID NO: 5648 - DNA, 23 bp, Artificial sequence
  Primer
gacgactcagtactgagtcgtcc

SEQ ID NO: 5649 - DNA, 23 bp, Artificial sequence
  Primer
ggagactcagtactgagtctccc

SEQ ID NO: 5650 - DNA, 23 bp, Artificial sequence
  Primer
ggcgactcagtactgagtcgcca

SEQ ID NO: 5651 - DNA, 23 bp, Artificial sequence
  Primer
tgcgactcagtactgagtcgcac

SEQ ID NO: 5652 - DNA, 23 bp, Artificial sequence
  Primer
ggtgactcagtactgagtcaccc

SEQ ID NO: 5653 - DNA, 23 bp, Artificial sequence
  Primer
cgggactcagtactgagtcccgt

SEQ ID NO: 5654 - DNA, 23 bp, Artificial sequence
  Primer
agggactcagtactgagtccctg

SEQ ID NO: 5655 - DNA, 23 bp, Artificial sequence
  Primer
caggactcagtactgagtcctgg

SEQ ID NO: 5656 - DNA, 23 bp, Artificial sequence
  Primer
cgagactcagtactgagtctcgg

SEQ ID NO: 5657 - DNA, 23 bp, Artificial sequence
  Primer
cgggactcagtactgagtcccga

SEQ ID NO: 5658 - DNA, 23 bp, Artificial sequence
  Primer
tgggactcagtactgagtcccag

SEQ ID NO: 5659 - DNA, 23 bp, Artificial sequence
  Primer
ctggactcagtactgagtccagg

SEQ ID NO: 5660 - DNA, 23 bp, Artificial sequence
  Primer
cgtgactcagtactgagtcacgg

SEQ ID NO: 5661 - DNA, 23 bp, Artificial sequence
  Primer
ggcgactcagtactgagtcgccg

SEQ ID NO: 5662 - DNA, 23 bp, Artificial sequence
  Primer
agcgactcagtactgagtcgctg

SEQ ID NO: 5663 - DNA, 23 bp, Artificial sequence
  Primer
gacgactcagtactgagtcgtcg

SEQ ID NO: 5664 - DNA, 23 bp, Artificial sequence
  Primer
ggagactcagtactgagtctccg

SEQ ID NO: 5665 - DNA, 23 bp, Artificial sequence
  Primer
tgcgactcagtactgagtcgcag

SEQ ID NO: 5666 - DNA, 23 bp, Artificial sequence
  Primer
ggtgactcagtactgagtcaccg

SEQ ID NO: 5667 - DNA, 23 bp, Artificial sequence
  Primer
acggactcagtactgagtccgtg

SEQ ID NO: 5668 - DNA, 23 bp, Artificial sequence
  Primer
ccagactcagtactgagtctggg

SEQ ID NO: 5669 - DNA, 23 bp, Artificial sequence
  Primer
tcggactcagtactgagtccgag

SEQ ID NO: 5670 - DNA, 23 bp, Artificial sequence
  Primer
cctgactcagtactgagtcaggg

SEQ ID NO: 5671 - DNA, 23 bp, Artificial sequence
  Primer
cacgactcagtactgagtcgtgg

SEQ ID NO: 5672 - DNA, 23 bp, Artificial sequence
  Primer
gccgactcagtactgagtcggct

SEQ ID NO: 5673 - DNA, 23 bp, Artificial sequence
  Primer
gccgactcagtactgagtcggca

SEQ ID NO: 5674 - DNA, 23 bp, Artificial sequence
  Primer
cgagactcagtactgagtctcgc

SEQ ID NO: 5675 - DNA, 23 bp, Artificial sequence
  Primer
cgtgactcagtactgagtcacgc

SEQ ID NO: 5676 - DNA, 23 bp, Artificial sequence
  Primer
caggactcagtactgagtcctgc

SEQ ID NO: 5677 - DNA, 23 bp, Artificial sequence
  Primer
ctggactcagtactgagtccagc

SEQ ID NO: 5678 - DNA, 23 bp, Artificial sequence
  Primer
gaggactcagtactgagtcctcg

SEQ ID NO: 5679 - DNA, 23 bp, Artificial sequence
  Primer
gtggactcagtactgagtccacg

SEQ ID NO: 5680 - DNA, 23 bp, Artificial sequence
  Primer
accgactcagtactgagtcggtg

SEQ ID NO: 5681 - DNA, 23 bp, Artificial sequence
  Primer
tccgactcagtactgagtcggag

SEQ ID NO: 5682 - DNA, 23 bp, Artificial sequence
  Primer
cgggactcagtactgagtcccgc

SEQ ID NO: 5683 - DNA, 23 bp, Artificial sequence
  Primer
agggactcagtactgagtccctc

SEQ ID NO: 5684 - DNA, 23 bp, Artificial sequence
  Primer
tgggactcagtactgagtcccac

SEQ ID NO: 5685 - DNA, 23 bp, Artificial sequence
  Primer
  misc_feature (1)..(3): n is a, c, g, or t
  misc_feature (20)..(23): n is a, c, g, or t
nnngactcaggcctgagtcnnnn

SEQ ID NO: 5686 - DNA, 23 bp, Artificial sequence
  Primer
gcggactcaggcctgagtccgcc

SEQ ID NO: 5687 - DNA, 23 bp, Artificial sequence
  Primer
gcggactcaggcctgagtccgct

SEQ ID NO: 5688 - DNA, 23 bp, Artificial sequence
  Primer
acggactcaggcctgagtccgtc

SEQ ID NO: 5689 - DNA, 23 bp, Artificial sequence
  Primer
gaggactcaggcctgagtcctcc

SEQ ID NO: 5690 - DNA, 23 bp, Artificial sequence
  Primer
gcagactcaggcctgagtctgcc

SEQ ID NO: 5691 - DNA, 23 bp, Artificial sequence
  Primer
gcggactcaggcctgagtccgca

SEQ ID NO: 5692 - DNA, 23 bp, Artificial sequence
  Primer
tcggactcaggcctgagtccgac

SEQ ID NO: 5693 - DNA, 23 bp, Artificial sequence
  Primer
gtggactcaggcctgagtccacc

SEQ ID NO: 5694 - DNA, 23 bp, Artificial sequence
  Primer
gctgactcaggcctgagtcagcc

SEQ ID NO: 5695 - DNA, 23 bp, Artificial sequence
  Primer
cccgactcaggcctgagtcgggc

SEQ ID NO: 5696 - DNA, 23 bp, Artificial sequence
  Primer
cccgactcaggcctgagtcgggt

SEQ ID NO: 5697 - DNA, 23 bp, Artificial sequence
  Primer
accgactcaggcctgagtcggtc

SEQ ID NO: 5698 - DNA, 23 bp, Artificial sequence
  Primer
cacgactcaggcctgagtcgtgc

SEQ ID NO: 5699 - DNA, 23 bp, Artificial sequence
  Primer
ccagactcaggcctgagtctggc

SEQ ID NO: 5700 - DNA, 23 bp, Artificial sequence
  Primer
cccgactcaggcctgagtcggga

SEQ ID NO: 5701 - DNA, 23 bp, Artificial sequence
  Primer
tccgactcaggcctgagtcggac

SEQ ID NO: 5702 - DNA, 23 bp, Artificial sequence
  Primer
cctgactcaggcctgagtcaggc

SEQ ID NO: 5703 - DNA, 23 bp, Artificial sequence
  Primer
ggcgactcaggcctgagtcgccc

SEQ ID NO: 5704 - DNA, 23 bp, Artificial sequence
  Primer
ggcgactcaggcctgagtcgcct

SEQ ID NO: 5705 - DNA, 23 bp, Artificial sequence
  Primer
agcgactcaggcctgagtcgctc

SEQ ID NO: 5706 - DNA, 23 bp, Artificial sequence
  Primer
gacgactcaggcctgagtcgtcc

SEQ ID NO: 5707 - DNA, 23 bp, Artificial sequence
  Primer
ggagactcaggcctgagtctccc

SEQ ID NO: 5708 - DNA, 23 bp, Artificial sequence
  Primer
ggcgactcaggcctgagtcgcca

SEQ ID NO: 5709 - DNA, 23 bp, Artificial sequence
  Primer
tgcgactcaggcctgagtcgcac

SEQ ID NO: 5710 - DNA, 23 bp, Artificial sequence
  Primer
ggtgactcaggcctgagtcaccc

SEQ ID NO: 5711 - DNA, 23 bp, Artificial sequence
  Primer
cgggactcaggcctgagtcccgt

SEQ ID NO: 5712 - DNA, 23 bp, Artificial sequence
  Primer
agggactcaggcctgagtccctg

SEQ ID NO: 5713 - DNA, 23 bp, Artificial sequence
  Primer
caggactcaggcctgagtcctgg

SEQ ID NO: 5714 - DNA, 23 bp, Artificial sequence
  Primer
cgagactcaggcctgagtctcgg

SEQ ID NO: 5715 - DNA, 23 bp, Artificial sequence
  Primer
cgggactcaggcctgagtcccga

SEQ ID NO: 5716 - DNA, 23 bp, Artificial sequence
  Primer
tgggactcaggcctgagtcccag

SEQ ID NO: 5717 - DNA, 23 bp, Artificial sequence
  Primer
ctggactcaggcctgagtccagg

SEQ ID NO: 5718 - DNA, 23 bp, Artificial sequence
  Primer
cgtgactcaggcctgagtcacgg

SEQ ID NO: 5719 - DNA, 23 bp, Artificial sequence
  Primer
ggcgactcaggcctgagtcgccg

SEQ ID NO: 5720 - DNA, 23 bp, Artificial sequence
  Primer
agcgactcaggcctgagtcgctg

SEQ ID NO: 5721 - DNA, 23 bp, Artificial sequence
  Primer
gacgactcaggcctgagtcgtcg

SEQ ID NO: 5722 - DNA, 23 bp, Artificial sequence
  Primer
ggagactcaggcctgagtctccg

SEQ ID NO: 5723 - DNA, 23 bp, Artificial sequence
  Primer
tgcgactcaggcctgagtcgcag

SEQ ID NO: 5724 - DNA, 23 bp, Artificial sequence
  Primer
ggtgactcaggcctgagtcaccg

SEQ ID NO: 5725 - DNA, 23 bp, Artificial sequence
  Primer
acggactcaggcctgagtccgtg

SEQ ID NO: 5726 - DNA, 23 bp, Artificial sequence
  Primer
ccagactcaggcctgagtctggg

SEQ ID NO: 5727 - DNA, 23 bp, Artificial sequence
  Primer
tcggactcaggcctgagtccgag

SEQ ID NO: 5728 - DNA, 23 bp, Artificial sequence
  Primer
cctgactcaggcctgagtcaggg

SEQ ID NO: 5729 - DNA, 23 bp, Artificial sequence
  Primer
cacgactcaggcctgagtcgtgg

SEQ ID NO: 5730 - DNA, 23 bp, Artificial sequence
  Primer
gccgactcaggcctgagtcggct

SEQ ID NO: 5731 - DNA, 23 bp, Artificial sequence
  Primer
gccgactcaggcctgagtcggca

SEQ ID NO: 5732 - DNA, 23 bp, Artificial sequence
  Primer
cgagactcaggcctgagtctcgc

SEQ ID NO: 5733 - DNA, 23 bp, Artificial sequence
  Primer
cgtgactcaggcctgagtcacgc

SEQ ID NO: 5734 - DNA, 23 bp, Artificial sequence
  Primer
caggactcaggcctgagtcctgc

SEQ ID NO: 5735 - DNA, 23 bp, Artificial sequence
  Primer
ctggactcaggcctgagtccagc

SEQ ID NO: 5736 - DNA, 23 bp, Artificial sequence
  Primer
gaggactcaggcctgagtcctcg

SEQ ID NO: 5737 - DNA, 23 bp, Artificial sequence
  Primer
gtggactcaggcctgagtccacg

SEQ ID NO: 5738 - DNA, 23 bp, Artificial sequence
  Primer
accgactcaggcctgagtcggtg

SEQ ID NO: 5739 - DNA, 23 bp, Artificial sequence
  Primer
tccgactcaggcctgagtcggag

SEQ ID NO: 5740 - DNA, 23 bp, Artificial sequence
  Primer
cgggactcaggcctgagtcccgc

SEQ ID NO: 5741 - DNA, 23 bp, Artificial sequence
  Primer
agggactcaggcctgagtccctc

SEQ ID NO: 5742 - DNA, 23 bp, Artificial sequence
  Primer
tgggactcaggcctgagtcccac

SEQ ID NO: 5743 - DNA, 23 bp, Artificial sequence
  Primer
  misc_feature (1)..(3): n is a, c, g, or t
  misc_feature (20)..(23): n is a, c, g, or t
nnngactcagcgctgagtcnnnn

SEQ ID NO: 5744 - DNA, 23 bp, Artificial sequence
  Primer
gcggactcagcgctgagtccgcc

SEQ ID NO: 5745 - DNA, 23 bp, Artificial sequence
  Primer
gcggactcagcgctgagtccgct

SEQ ID NO: 5746 - DNA, 23 bp, Artificial sequence
  Primer
acggactcagcgctgagtccgtc

SEQ ID NO: 5747 - DNA, 23 bp, Artificial sequence
  Primer
gaggactcagcgctgagtcctcc

SEQ ID NO: 5748 - DNA, 23 bp, Artificial sequence
  Primer
gcagactcagcgctgagtctgcc

SEQ ID NO: 5749 - DNA, 23 bp, Artificial sequence
  Primer
gcggactcagcgctgagtccgca

SEQ ID NO: 5750 - DNA, 23 bp, Artificial sequence
  Primer
tcggactcagcgctgagtccgac

SEQ ID NO: 5751 - DNA, 23 bp, Artificial sequence
  Primer
gtggactcagcgctgagtccacc

SEQ ID NO: 5752 - DNA, 23 bp, Artificial sequence
  Primer
gctgactcagcgctgagtcagcc

SEQ ID NO: 5753 - DNA, 23 bp, Artificial sequence
  Primer
cccgactcagcgctgagtcgggc

SEQ ID NO: 5754 - DNA, 23 bp, Artificial sequence
  Primer
cccgactcagcgctgagtcgggt

SEQ ID NO: 5755 - DNA, 23 bp, Artificial sequence
  Primer
accgactcagcgctgagtcggtc

SEQ ID NO: 5756 - DNA, 23 bp, Artificial sequence
  Primer
cacgactcagcgctgagtcgtgc

SEQ ID NO: 5757 - DNA, 23 bp, Artificial sequence
  Primer
ccagactcagcgctgagtctggc

SEQ ID NO: 5758 - DNA, 23 bp, Artificial sequence
  Primer
cccgactcagcgctgagtcggga

SEQ ID NO: 5759 - DNA, 23 bp, Artificial sequence
  Primer
tccgactcagcgctgagtcggac

SEQ ID NO: 5760 - DNA, 23 bp, Artificial sequence
  Primer
cctgactcagcgctgagtcaggc

SEQ ID NO: 5761 - DNA, 23 bp, Artificial sequence
  Primer
ggcgactcagcgctgagtcgccc

SEQ ID NO: 5762 - DNA, 23 bp, Artificial sequence
  Primer
ggcgactcagcgctgagtcgcct

SEQ ID NO: 5763 - DNA, 23 bp, Artificial sequence
  Primer
agcgactcagcgctgagtcgctc

SEQ ID NO: 5764 - DNA, 23 bp, Artificial sequence
  Primer
gacgactcagcgctgagtcgtcc

SEQ ID NO: 5765 - DNA, 23 bp, Artificial sequence
  Primer
ggagactcagcgctgagtctccc

SEQ ID NO: 5766 - DNA, 23 bp, Artificial sequence
  Primer
ggcgactcagcgctgagtcgcca

SEQ ID NO: 5767 - DNA, 23 bp, Artificial sequence
  Primer
tgcgactcagcgctgagtcgcac

SEQ ID NO: 5768 - DNA, 23 bp, Artificial sequence
  Primer
ggtgactcagcgctgagtcaccc

SEQ ID NO: 5769 - DNA, 23 bp, Artificial sequence
  Primer
cgggactcagcgctgagtcccgt

SEQ ID NO: 5770 - DNA, 23 bp, Artificial sequence
  Primer
agggactcagcgctgagtccctg

SEQ ID NO: 5771 - DNA, 23 bp, Artificial sequence
  Primer
caggactcagcgctgagtcctgg

SEQ ID NO: 5772 - DNA, 23 bp, Artificial sequence
  Primer
cgagactcagcgctgagtctcgg

SEQ ID NO: 5773 - DNA, 23 bp, Artificial sequence
  Primer
cgggactcagcgctgagtcccga

SEQ ID NO: 5774 - DNA, 23 bp, Artificial sequence
  Primer
tgggactcagcgctgagtcccag

SEQ ID NO: 5775 - DNA, 23 bp, Artificial sequence
  Primer
ctggactcagcgctgagtccagg

SEQ ID NO: 5776 - DNA, 23 bp, Artificial sequence
  Primer
cgtgactcagcgctgagtcacgg

SEQ ID NO: 5777 - DNA, 23 bp, Artificial sequence
  Primer
ggcgactcagcgctgagtcgccg

SEQ ID NO: 5778 - DNA, 23 bp, Artificial sequence
  Primer
agcgactcagcgctgagtcgctg

SEQ ID NO: 5779 - DNA, 23 bp, Artificial sequence
  Primer
gacgactcagcgctgagtcgtcg

SEQ ID NO: 5780 - DNA, 23 bp, Artificial sequence
  Primer
ggagactcagcgctgagtctccg

SEQ ID NO: 5781 - DNA, 23 bp, Artificial sequence
  Primer
tgcgactcagcgctgagtcgcag

SEQ ID NO: 5782 - DNA, 23 bp, Artificial sequence
  Primer
ggtgactcagcgctgagtcaccg

SEQ ID NO: 5783 - DNA, 23 bp, Artificial sequence
  Primer
acggactcagcgctgagtccgtg

SEQ ID NO: 5784 - DNA, 23 bp, Artificial sequence
  Primer
ccagactcagcgctgagtctggg

SEQ ID NO: 5785 - DNA, 23 bp, Artificial sequence
  Primer
tcggactcagcgctgagtccgag

SEQ ID NO: 5786 - DNA, 23 bp, Artificial sequence
  Primer
cctgactcagcgctgagtcaggg

SEQ ID NO: 5787 - DNA, 23 bp, Artificial sequence
  Primer
cacgactcagcgctgagtcgtgg

SEQ ID NO: 5788 - DNA, 23 bp, Artificial sequence
  Primer
gccgactcagcgctgagtcggct

SEQ ID NO: 5789 - DNA, 23 bp, Artificial sequence
  Primer
gccgactcagcgctgagtcggca

SEQ ID NO: 5790 - DNA, 23 bp, Artificial sequence
  Primer
cgagactcagcgctgagtctcgc

SEQ ID NO: 5791 - DNA, 23 bp, Artificial sequence
  Primer
cgtgactcagcgctgagtcacgc

SEQ ID NO: 5792 - DNA, 23 bp, Artificial sequence
  Primer
caggactcagcgctgagtcctgc

SEQ ID NO: 5793 - DNA, 23 bp, Artificial sequence
  Primer
ctggactcagcgctgagtccagc

SEQ ID NO: 5794 - DNA, 23 bp, Artificial sequence
  Primer
gaggactcagcgctgagtcctcg

SEQ ID NO: 5795 - DNA, 23 bp, Artificial sequence
  Primer
gtggactcagcgctgagtccacg

SEQ ID NO: 5796 - DNA, 23 bp, Artificial sequence
  Primer
accgactcagcgctgagtcggtg

SEQ ID NO: 5797 - DNA, 23 bp, Artificial sequence
  Primer
tccgactcagcgctgagtcggag

SEQ ID NO: 5798 - DNA, 23 bp, Artificial sequence
  Primer
cgggactcagcgctgagtcccgc

SEQ ID NO: 5799 - DNA, 23 bp, Artificial sequence
  Primer
agggactcagcgctgagtccctc

SEQ ID NO: 5800 - DNA, 23 bp, Artificial sequence
  Primer
tgggactcagcgctgagtcccac

SEQ ID NO: 5801 - DNA, 23 bp, Artificial sequence
  Primer
  misc_feature (1)..(3): n is a, c, g, or t
  misc_feature (20)..(23): n is a, c, g, or t
nnngactcaaatttgagtcnnnn

SEQ ID NO: 5802 - DNA, 23 bp, Artificial sequence
  Primer
gcggactcaaatttgagtccgcc

SEQ ID NO: 5803 - DNA, 23 bp, Artificial sequence
  Primer
gcggactcaaatttgagtccgct

SEQ ID NO: 5804 - DNA, 23 bp, Artificial sequence
  Primer
acggactcaaatttgagtccgtc

SEQ ID NO: 5805 - DNA, 23 bp, Artificial sequence
  Primer
gaggactcaaatttgagtcctcc

SEQ ID NO: 5806 - DNA, 23 bp, Artificial sequence
  Primer
gcagactcaaatttgagtctgcc

SEQ ID NO: 5807 - DNA, 23 bp, Artificial sequence
  Primer
gcggactcaaatttgagtccgca

SEQ ID NO: 5808 - DNA, 23 bp, Artificial sequence
  Primer
tcggactcaaatttgagtccgac

SEQ ID NO: 5809 - DNA, 23 bp, Artificial sequence
  Primer
gtggactcaaatttgagtccacc

SEQ ID NO: 5810 - DNA, 23 bp, Artificial sequence
  Primer
gctgactcaaatttgagtcagcc

SEQ ID NO: 5811 - DNA, 23 bp, Artificial sequence
  Primer
cccgactcaaatttgagtcgggc

SEQ ID NO: 5812 - DNA, 23 bp, Artificial sequence
  Primer
cccgactcaaatttgagtcgggt

SEQ ID NO: 5813 - DNA, 23 bp, Artificial sequence
  Primer
accgactcaaatttgagtcggtc

SEQ ID NO: 5814 - DNA, 23 bp, Artificial sequence
  Primer
cacgactcaaatttgagtcgtgc

SEQ ID NO: 5815 - DNA, 23 bp, Artificial sequence
  Primer
ccagactcaaatttgagtctggc

SEQ ID NO: 5816 - DNA, 23 bp, Artificial sequence
  Primer
cccgactcaaatttgagtcggga

SEQ ID NO: 5817 - DNA, 23 bp, Artificial sequence
  Primer
tccgactcaaatttgagtcggac

SEQ ID NO: 5818 - DNA, 23 bp, Artificial sequence
  Primer
cctgactcaaatttgagtcaggc

SEQ ID NO: 5819 - DNA, 23 bp, Artificial sequence
  Primer
ggcgactcaaatttgagtcgccc

SEQ ID NO: 5820 - DNA, 23 bp, Artificial sequence
  Primer
ggcgactcaaatttgagtcgcct

SEQ ID NO: 5821 - DNA, 23 bp, Artificial sequence
  Primer
agcgactcaaatttgagtcgctc

SEQ ID NO: 5822 - DNA, 23 bp, Artificial sequence
  Primer
gacgactcaaatttgagtcgtcc

SEQ ID NO: 5823 - DNA, 23 bp, Artificial sequence
  Primer
ggagactcaaatttgagtctccc

SEQ ID NO: 5824 - DNA, 23 bp, Artificial sequence
  Primer
ggcgactcaaatttgagtcgcca

SEQ ID NO: 5825 - DNA, 23 bp, Artificial sequence
  Primer
tgcgactcaaatttgagtcgcac

SEQ ID NO: 5826 - DNA, 23 bp, Artificial sequence
  Primer
ggtgactcaaatttgagtcaccc

SEQ ID NO: 5827 - DNA, 23 bp, Artificial sequence
  Primer
cgggactcaaatttgagtcccgt

SEQ ID NO: 5828 - DNA, 23 bp, Artificial sequence
  Primer
agggactcaaatttgagtccctg

SEQ ID NO: 5829 - DNA, 23 bp, Artificial sequence
  Primer
caggactcaaatttgagtcctgg

SEQ ID NO: 5830 - DNA, 23 bp, Artificial sequence
  Primer
cgagactcaaatttgagtctcgg

SEQ ID NO: 5831 - DNA, 23 bp, Artificial sequence
  Primer
cgggactcaaatttgagtcccga

SEQ ID NO: 5832 - DNA, 23 bp, Artificial sequence
  Primer
tgggactcaaatttgagtcccag

SEQ ID NO: 5833 - DNA, 23 bp, Artificial sequence
  Primer
ctggactcaaatttgagtccagg

SEQ ID NO: 5834 - DNA, 23 bp, Artificial sequence
  Primer
cgtgactcaaatttgagtcacgg

SEQ ID NO: 5835 - DNA, 23 bp, Artificial sequence
  Primer
ggcgactcaaatttgagtcgccg

SEQ ID NO: 5836 - DNA, 23 bp, Artificial sequence
  Primer
agcgactcaaatttgagtcgctg

SEQ ID NO: 5837 - DNA, 23 bp, Artificial sequence
  Primer
gacgactcaaatttgagtcgtcg

SEQ ID NO: 5838 - DNA, 23 bp, Artificial sequence
  Primer
ggagactcaaatttgagtctccg

SEQ ID NO: 5839 - DNA, 23 bp, Artificial sequence
  Primer
tgcgactcaaatttgagtcgcag

SEQ ID NO: 5840 - DNA, 23 bp, Artificial sequence
  Primer
ggtgactcaaatttgagtcaccg

SEQ ID NO: 5841 - DNA, 23 bp, Artificial sequence
  Primer
acggactcaaatttgagtccgtg

SEQ ID NO: 5842 - DNA, 23 bp, Artificial sequence
  Primer
ccagactcaaatttgagtctggg

SEQ ID NO: 5843 - DNA, 23 bp, Artificial sequence
  Primer
tcggactcaaatttgagtccgag

SEQ ID NO: 5844 - DNA, 23 bp, Artificial sequence
  Primer
cctgactcaaatttgagtcaggg

SEQ ID NO: 5845 - DNA, 23 bp, Artificial sequence
  Primer
cacgactcaaatttgagtcgtgg

SEQ ID NO: 5846 - DNA, 23 bp, Artificial sequence
  Primer
gccgactcaaatttgagtcggct

SEQ ID NO: 5847 - DNA, 23 bp, Artificial sequence
  Primer
gccgactcaaatttgagtcggca

SEQ ID NO: 5848 - DNA, 23 bp, Artificial sequence
  Primer
cgagactcaaatttgagtctcgc

SEQ ID NO: 5849 - DNA, 23 bp, Artificial sequence
  Primer
cgtgactcaaatttgagtcacgc

SEQ ID NO: 5850 - DNA, 23 bp, Artificial sequence
  Primer
caggactcaaatttgagtcctgc

SEQ ID NO: 5851 - DNA, 23 bp, Artificial sequence
  Primer
ctggactcaaatttgagtccagc

SEQ ID NO: 5852 - DNA, 23 bp, Artificial sequence
  Primer
gaggactcaaatttgagtcctcg

SEQ ID NO: 5853 - DNA, 23 bp, Artificial sequence
  Primer
gtggactcaaatttgagtccacg

SEQ ID NO: 5854 - DNA, 23 bp, Artificial sequence
  Primer
accgactcaaatttgagtcggtg

SEQ ID NO: 5855 - DNA, 23 bp, Artificial sequence
  Primer
tccgactcaaatttgagtcggag

SEQ ID NO: 5856 - DNA, 23 bp, Artificial sequence
  Primer
cgggactcaaatttgagtcccgc

SEQ ID NO: 5857 - DNA, 23 bp, Artificial sequence
  Primer
agggactcaaatttgagtccctc

SEQ ID NO: 5858 - DNA, 23 bp, Artificial sequence
  Primer
tgggactcaaatttgagtcccac

SEQ ID NO: 5859 - DNA, 23 bp, Artificial sequence
  Primer
  misc_feature (1)..(3): n is a, c, g, or t
  misc_feature (20)..(23): n is a, c, g, or t
nnngactcaatattgagtcnnnn

SEQ ID NO: 5860 - DNA, 23 bp, Artificial sequence
  Primer
gcggactcaatattgagtccgcc

SEQ ID NO: 5861 - DNA, 23 bp, Artificial sequence
  Primer
gcggactcaatattgagtccgct

SEQ ID NO: 5862 - DNA, 23 bp, Artificial sequence
  Primer
acggactcaatattgagtccgtc

SEQ ID NO: 5863 - DNA, 23 bp, Artificial sequence
  Primer
gaggactcaatattgagtcctcc

SEQ ID NO: 5864 - DNA, 23 bp, Artificial sequence
  Primer
gcagactcaatattgagtctgcc

SEQ ID NO: 5865 - DNA, 23 bp, Artificial sequence
  Primer
gcggactcaatattgagtccgca

SEQ ID NO: 5866 - DNA, 23 bp, Artificial sequence
  Primer
tcggactcaatattgagtccgac

SEQ ID NO: 5867 - DNA, 23 bp, Artificial sequence
  Primer
gtggactcaatattgagtccacc

SEQ ID NO: 5868 - DNA, 23 bp, Artificial sequence
  Primer
gctgactcaatattgagtcagcc

SEQ ID NO: 5869 - DNA, 23 bp, Artificial sequence
  Primer
cccgactcaatattgagtcgggc

SEQ ID NO: 5870 - DNA, 23 bp, Artificial sequence
  Primer
cccgactcaatattgagtcgggt

SEQ ID NO: 5871 - DNA, 23 bp, Artificial sequence
  Primer
accgactcaatattgagtcggtc

SEQ ID NO: 5872 - DNA, 23 bp, Artificial sequence
  Primer
cacgactcaatattgagtcgtgc

SEQ ID NO: 5873 - DNA, 23 bp, Artificial sequence
  Primer
ccagactcaatattgagtctggc

SEQ ID NO: 5874 - DNA, 23 bp, Artificial sequence
  Primer
cccgactcaatattgagtcggga

SEQ ID NO: 5875 - DNA, 23 bp, Artificial sequence
  Primer
tccgactcaatattgagtcggac

SEQ ID NO: 5876 - DNA, 23 bp, Artificial sequence
  Primer
cctgactcaatattgagtcaggc

SEQ ID NO: 5877 - DNA, 23 bp, Artificial sequence
  Primer
ggcgactcaatattgagtcgccc

SEQ ID NO: 5878 - DNA, 23 bp, Artificial sequence
  Primer
ggcgactcaatattgagtcgcct

SEQ ID NO: 5879 - DNA, 23 bp, Artificial sequence
  Primer
agcgactcaatattgagtcgctc

SEQ ID NO: 5880 - DNA, 23 bp, Artificial sequence
  Primer
gacgactcaatattgagtcgtcc

SEQ ID NO: 5881 - DNA, 23 bp, Artificial sequence
  Primer
ggagactcaatattgagtctccc

SEQ ID NO: 5882 - DNA, 23 bp, Artificial sequence
  Primer
ggcgactcaatattgagtcgcca

SEQ ID NO: 5883 - DNA, 23 bp, Artificial sequence
  Primer
tgcgactcaatattgagtcgcac

SEQ ID NO: 5884 - DNA, 23 bp, Artificial sequence
  Primer
ggtgactcaatattgagtcaccc

SEQ ID NO: 5885 - DNA, 23 bp, Artificial sequence
  Primer
cgggactcaatattgagtcccgt

SEQ ID NO: 5886 - DNA, 23 bp, Artificial sequence
  Primer
agggactcaatattgagtccctg

SEQ ID NO: 5887 - DNA, 23 bp, Artificial sequence
  Primer
caggactcaatattgagtcctgg

SEQ ID NO: 5888 - DNA, 23 bp, Artificial sequence
  Primer
cgagactcaatattgagtctcgg

SEQ ID NO: 5889 - DNA, 23 bp, Artificial sequence
  Primer
cgggactcaatattgagtcccga

SEQ ID NO: 5890 - DNA, 23 bp, Artificial sequence
  Primer
tgggactcaatattgagtcccag

SEQ ID NO: 5891 - DNA, 23 bp, Artificial sequence
  Primer
ctggactcaatattgagtccagg

SEQ ID NO: 5892 - DNA, 23 bp, Artificial sequence
  Primer
cgtgactcaatattgagtcacgg

SEQ ID NO: 5893 - DNA, 23 bp, Artificial sequence
  Primer
ggcgactcaatattgagtcgccg

SEQ ID NO: 5894 - DNA, 23 bp, Artificial sequence
  Primer
agcgactcaatattgagtcgctg

SEQ ID NO: 5895 - DNA, 23 bp, Artificial sequence
  Primer
gacgactcaatattgagtcgtcg

SEQ ID NO: 5896 - DNA, 23 bp, Artificial sequence
  Primer
ggagactcaatattgagtctccg

SEQ ID NO: 5897 - DNA, 23 bp, Artificial sequence
  Primer
tgcgactcaatattgagtcgcag

SEQ ID NO: 5898 - DNA, 23 bp, Artificial sequence
  Primer
ggtgactcaatattgagtcaccg

SEQ ID NO: 5899 - DNA, 23 bp, Artificial sequence
  Primer
acggactcaatattgagtccgtg

SEQ ID NO: 5900 - DNA, 23 bp, Artificial sequence
  Primer
ccagactcaatattgagtctggg

SEQ ID NO: 5901 - DNA, 23 bp, Artificial sequence
  Primer
tcggactcaatattgagtccgag

SEQ ID NO: 5902 - DNA, 23 bp, Artificial sequence
  Primer
cctgactcaatattgagtcaggg

SEQ ID NO: 5903 - DNA, 23 bp, Artificial sequence
  Primer
cacgactcaatattgagtcgtgg

SEQ ID NO: 5904 - DNA, 23 bp, Artificial sequence
  Primer
gccgactcaatattgagtcggct

SEQ ID NO: 5905 - DNA, 23 bp, Artificial sequence
  Primer
gccgactcaatattgagtcggca

SEQ ID NO: 5906 - DNA, 23 bp, Artificial sequence
  Primer
cgagactcaatattgagtctcgc

SEQ ID NO: 5907 - DNA, 23 bp, Artificial sequence
  Primer
cgtgactcaatattgagtcacgc

SEQ ID NO: 5908 - DNA, 23 bp, Artificial sequence
  Primer
caggactcaatattgagtcctgc

SEQ ID NO: 5909 - DNA, 23 bp, Artificial sequence
  Primer
ctggactcaatattgagtccagc

SEQ ID NO: 5910 - DNA, 23 bp, Artificial sequence
  Primer
gaggactcaatattgagtcctcg

SEQ ID NO: 5911 - DNA, 23 bp, Artificial sequence
  Primer
gtggactcaatattgagtccacg

SEQ ID NO: 5912 - DNA, 23 bp, Artificial sequence
  Primer
accgactcaatattgagtcggtg

SEQ ID NO: 5913 - DNA, 23 bp, Artificial sequence
  Primer
tccgactcaatattgagtcggag

SEQ ID NO: 5914 - DNA, 23 bp, Artificial sequence
  Primer
cgggactcaatattgagtcccgc

SEQ ID NO: 5915 - DNA, 23 bp, Artificial sequence
  Primer
agggactcaatattgagtccctc

SEQ ID NO: 5916 - DNA, 23 bp, Artificial sequence
  Primer
tgggactcaatattgagtcccac

SEQ ID NO: 5917 - DNA, 23 bp, Artificial sequence
  Primer
  misc_feature (1)..(3): n is a, c, g, or t
  misc_feature (20)..(23): n is a, c, g, or t
nnngactcaagcttgagtcnnnn

SEQ ID NO: 5918 - DNA, 23 bp, Artificial sequence
  Primer
gcggactcaagcttgagtccgcc

SEQ ID NO: 5919 - DNA, 23 bp, Artificial sequence
  Primer
gcggactcaagcttgagtccgct

SEQ ID NO: 5920 - DNA, 23 bp, Artificial sequence
  Primer
acggactcaagcttgagtccgtc

SEQ ID NO: 5921 - DNA, 23 bp, Artificial sequence
  Primer
gaggactcaagcttgagtcctcc

SEQ ID NO: 5922 - DNA, 23 bp, Artificial sequence
  Primer
gcagactcaagcttgagtctgcc

SEQ ID NO: 5923 - DNA, 23 bp, Artificial sequence
  Primer
gcggactcaagcttgagtccgca

SEQ ID NO: 5924 - DNA, 23 bp, Artificial sequence
  Primer
tcggactcaagcttgagtccgac

SEQ ID NO: 5925 - DNA, 23 bp, Artificial sequence
  Primer
gtggactcaagcttgagtccacc

SEQ ID NO: 5926 - DNA, 23 bp, Artificial sequence
  Primer
gctgactcaagcttgagtcagcc

SEQ ID NO: 5927 - DNA, 23 bp, Artificial sequence
  Primer
cccgactcaagcttgagtcgggc

SEQ ID NO: 5928 - DNA, 23 bp, Artificial sequence
  Primer
cccgactcaagcttgagtcgggt

SEQ ID NO: 5929 - DNA, 23 bp, Artificial sequence
  Primer
accgactcaagcttgagtcggtc

SEQ ID NO: 5930 - DNA, 23 bp, Artificial sequence
  Primer
cacgactcaagcttgagtcgtgc

SEQ ID NO: 5931 - DNA, 23 bp, Artificial sequence
  Primer
ccagactcaagcttgagtctggc

SEQ ID NO: 5932 - DNA, 23 bp, Artificial sequence
  Primer
cccgactcaagcttgagtcggga

SEQ ID NO: 5933 - DNA, 23 bp, Artificial sequence
  Primer
tccgactcaagcttgagtcggac

SEQ ID NO: 5934 - DNA, 23 bp, Artificial sequence
  Primer
cctgactcaagcttgagtcaggc

SEQ ID NO: 5935 - DNA, 23 bp, Artificial sequence
  Primer
ggcgactcaagcttgagtcgccc

SEQ ID NO: 5936 - DNA, 23 bp, Artificial sequence
  Primer
ggcgactcaagcttgagtcgcct

SEQ ID NO: 5937 - DNA, 23 bp, Artificial sequence
  Primer
agcgactcaagcttgagtcgctc

SEQ ID NO: 5938 - DNA, 23 bp, Artificial sequence
  Primer
gacgactcaagcttgagtcgtcc

SEQ ID NO: 5939 - DNA, 23 bp, Artificial sequence
  Primer
ggagactcaagcttgagtctccc

SEQ ID NO: 5940 - DNA, 23 bp, Artificial sequence
  Primer
ggcgactcaagcttgagtcgcca

SEQ ID NO: 5941 - DNA, 23 bp, Artificial sequence
  Primer
tgcgactcaagcttgagtcgcac

SEQ ID NO: 5942 - DNA, 23 bp, Artificial sequence
  Primer
ggtgactcaagcttgagtcaccc

SEQ ID NO: 5943 - DNA, 23 bp, Artificial sequence
  Primer
cgggactcaagcttgagtcccgt

SEQ ID NO: 5944 - DNA, 23 bp, Artificial sequence
  Primer
agggactcaagcttgagtccctg

SEQ ID NO: 5945 - DNA, 23 bp, Artificial sequence
  Primer
caggactcaagcttgagtcctgg

SEQ ID NO: 5946 - DNA, 23 bp, Artificial sequence
  Primer
cgagactcaagcttgagtctcgg

SEQ ID NO: 5947 - DNA, 23 bp, Artificial sequence
  Primer
cgggactcaagcttgagtcccga

SEQ ID NO: 5948 - DNA, 23 bp, Artificial sequence
  Primer
tgggactcaagcttgagtcccag

SEQ ID NO: 5949 - DNA, 23 bp, Artificial sequence
  Primer
ctggactcaagcttgagtccagg

SEQ ID NO: 5950 - DNA, 23 bp, Artificial sequence
  Primer
cgtgactcaagcttgagtcacgg

SEQ ID NO: 5951 - DNA, 23 bp, Artificial sequence
  Primer
ggcgactcaagcttgagtcgccg

SEQ ID NO: 5952 - DNA, 23 bp, Artificial sequence
  Primer
agcgactcaagcttgagtcgctg

SEQ ID NO: 5953 - DNA, 23 bp, Artificial sequence
  Primer
gacgactcaagcttgagtcgtcg

SEQ ID NO: 5954 - DNA, 23 bp, Artificial sequence
  Primer
ggagactcaagcttgagtctccg

SEQ ID NO: 5955 - DNA, 23 bp, Artificial sequence
  Primer
tgcgactcaagcttgagtcgcag

SEQ ID NO: 5956 - DNA, 23 bp, Artificial sequence
  Primer
ggtgactcaagcttgagtcaccg

SEQ ID NO: 5957 - DNA, 23 bp, Artificial sequence
  Primer
acggactcaagcttgagtccgtg

SEQ ID NO: 5958 - DNA, 23 bp, Artificial sequence
  Primer
ccagactcaagcttgagtctggg

SEQ ID NO: 5959 - DNA, 23 bp, Artificial sequence
  Primer
tcggactcaagcttgagtccgag

SEQ ID NO: 5960 - DNA, 23 bp, Artificial sequence
  Primer
cctgactcaagcttgagtcaggg

SEQ ID NO: 5961 - DNA, 23 bp, Artificial sequence
  Primer
cacgactcaagcttgagtcgtgg

SEQ ID NO: 5962 - DNA, 23 bp, Artificial sequence
  Primer
gccgactcaagcttgagtcggct

SEQ ID NO: 5963 - DNA, 23 bp, Artificial sequence
  Primer
gccgactcaagcttgagtcggca

SEQ ID NO: 5964 - DNA, 23 bp, Artificial sequence
  Primer
cgagactcaagcttgagtctcgc

SEQ ID NO: 5965 - DNA, 23 bp, Artificial sequence
  Primer
cgtgactcaagcttgagtcacgc

SEQ ID NO: 5966 - DNA, 23 bp, Artificial sequence
  Primer
caggactcaagcttgagtcctgc

SEQ ID NO: 5967 - DNA, 23 bp, Artificial sequence
  Primer
ctggactcaagcttgagtccagc

SEQ ID NO: 5968 - DNA, 23 bp, Artificial sequence
  Primer
gaggactcaagcttgagtcctcg

SEQ ID NO: 5969 - DNA, 23 bp, Artificial sequence
  Primer
gtggactcaagcttgagtccacg

SEQ ID NO: 5970 - DNA, 23 bp, Artificial sequence
  Primer
accgactcaagcttgagtcggtg

SEQ ID NO: 5971 - DNA, 23 bp, Artificial sequence
  Primer
tccgactcaagcttgagtcggag

SEQ ID NO: 5972 - DNA, 23 bp, Artificial sequence
  Primer
cgggactcaagcttgagtcccgc

SEQ ID NO: 5973 - DNA, 23 bp, Artificial sequence
  Primer
agggactcaagcttgagtccctc

SEQ ID NO: 5974 - DNA, 23 bp, Artificial sequence
  Primer
tgggactcaagcttgagtcccac

SEQ ID NO: 5975 - DNA, 23 bp, Artificial sequence
  Primer
  misc_feature (1)..(3): n is a, c, g, or t
  misc_feature (20)..(23): n is a, c, g, or t
nnngactcaacgttgagtcnnnn

SEQ ID NO: 5976 - DNA, 23 bp, Artificial sequence
  Primer
gcggactcaacgttgagtccgcc

SEQ ID NO: 5977 - DNA, 23 bp, Artificial sequence
  Primer
gcggactcaacgttgagtccgct

SEQ ID NO: 5978 - DNA, 23 bp, Artificial sequence
  Primer
acggactcaacgttgagtccgtc

SEQ ID NO: 5979 - DNA, 23 bp, Artificial sequence
  Primer
gaggactcaacgttgagtcctcc

SEQ ID NO: 5980 - DNA, 23 bp, Artificial sequence
  Primer
gcagactcaacgttgagtctgcc

SEQ ID NO: 5981 - DNA, 23 bp, Artificial sequence
  Primer
gcggactcaacgttgagtccgca

SEQ ID NO: 5982 - DNA, 23 bp, Artificial sequence
  Primer
tcggactcaacgttgagtccgac

SEQ ID NO: 5983 - DNA, 23 bp, Artificial sequence
  Primer
gtggactcaacgttgagtccacc

SEQ ID NO: 5984 - DNA, 23 bp, Artificial sequence
  Primer
gctgactcaacgttgagtcagcc

SEQ ID NO: 5985 - DNA, 23 bp, Artificial sequence
  Primer
cccgactcaacgttgagtcgggc

SEQ ID NO: 5986 - DNA, 23 bp, Artificial sequence
  Primer
cccgactcaacgttgagtcgggt

SEQ ID NO: 5987 - DNA, 23 bp, Artificial sequence
  Primer
accgactcaacgttgagtcggtc

SEQ ID NO: 5988 - DNA, 23 bp, Artificial sequence
  Primer
cacgactcaacgttgagtcgtgc

SEQ ID NO: 5989 - DNA, 23 bp, Artificial sequence
  Primer
ccagactcaacgttgagtctggc

SEQ ID NO: 5990 - DNA, 23 bp, Artificial sequence
  Primer
cccgactcaacgttgagtcggga

SEQ ID NO: 5991 - DNA, 23 bp, Artificial sequence
  Primer
tccgactcaacgttgagtcggac

SEQ ID NO: 5992 - DNA, 23 bp, Artificial sequence
  Primer
cctgactcaacgttgagtcaggc

SEQ ID NO: 5993 - DNA, 23 bp, Artificial sequence
  Primer
ggcgactcaacgttgagtcgccc

SEQ ID NO: 5994 - DNA, 23 bp, Artificial sequence
  Primer
ggcgactcaacgttgagtcgcct

SEQ ID NO: 5995 - DNA, 23 bp, Artificial sequence
  Primer
agcgactcaacgttgagtcgctc

SEQ ID NO: 5996 - DNA, 23 bp, Artificial sequence
  Primer
gacgactcaacgttgagtcgtcc

SEQ ID NO: 5997 - DNA, 23 bp, Artificial sequence
  Primer
ggagactcaacgttgagtctccc

SEQ ID NO: 5998 - DNA, 23 bp, Artificial sequence
  Primer
ggcgactcaacgttgagtcgcca

SEQ ID NO: 5999 - DNA, 23 bp, Artificial sequence
  Primer
tgcgactcaacgttgagtcgcac

SEQ ID NO: 6000 - DNA, 23 bp, Artificial sequence
  Primer
ggtgactcaacgttgagtcaccc

SEQ ID NO: 6001 - DNA, 23 bp, Artificial sequence
  Primer
cgggactcaacgttgagtcccgt

SEQ ID NO: 6002 - DNA, 23 bp, Artificial sequence
  Primer
agggactcaacgttgagtccctg

SEQ ID NO: 6003 - DNA, 23 bp, Artificial sequence
  Primer
caggactcaacgttgagtcctgg

SEQ ID NO: 6004 - DNA, 23 bp, Artificial sequence
  Primer
cgagactcaacgttgagtctcgg

SEQ ID NO: 6005 - DNA, 23 bp, Artificial sequence
  Primer
cgggactcaacgttgagtcccga

SEQ ID NO: 6006 - DNA, 23 bp, Artificial sequence
  Primer
tgggactcaacgttgagtcccag

SEQ ID NO: 6007 - DNA, 23 bp, Artificial sequence
  Primer
ctggactcaacgttgagtccagg

SEQ ID NO: 6008 - DNA, 23 bp, Artificial sequence
  Primer
cgtgactcaacgttgagtcacgg

SEQ ID NO: 6009 - DNA, 23 bp, Artificial sequence
  Primer
ggcgactcaacgttgagtcgccg

SEQ ID NO: 6010 - DNA, 23 bp, Artificial sequence
  Primer
agcgactcaacgttgagtcgctg

SEQ ID NO: 6011 - DNA, 23 bp, Artificial sequence
  Primer
gacgactcaacgttgagtcgtcg

SEQ ID NO: 6012 - DNA, 23 bp, Artificial sequence
  Primer
ggagactcaacgttgagtctccg

SEQ ID NO: 6013 - DNA, 23 bp, Artificial sequence
  Primer
tgcgactcaacgttgagtcgcag

SEQ ID NO: 6014 - DNA, 23 bp, Artificial sequence
  Primer
ggtgactcaacgttgagtcaccg

SEQ ID NO: 6015 - DNA, 23 bp, Artificial sequence
  Primer
acggactcaacgttgagtccgtg

SEQ ID NO: 6016 - DNA, 23 bp, Artificial sequence
  Primer
ccagactcaacgttgagtctggg

SEQ ID NO: 6017 - DNA, 23 bp, Artificial sequence
  Primer
tcggactcaacgttgagtccgag

SEQ ID NO: 6018 - DNA, 23 bp, Artificial sequence
  Primer
cctgactcaacgttgagtcaggg

SEQ ID NO: 6019 - DNA, 23 bp, Artificial sequence
  Primer
cacgactcaacgttgagtcgtgg

SEQ ID NO: 6020 - DNA, 23 bp, Artificial sequence
  Primer
gccgactcaacgttgagtcggct

SEQ ID NO: 6021 - DNA, 23 bp, Artificial sequence
  Primer
gccgactcaacgttgagtcggca

SEQ ID NO: 6022 - DNA, 23 bp, Artificial sequence
  Primer
cgagactcaacgttgagtctcgc

SEQ ID NO: 6023 - DNA, 23 bp, Artificial sequence
  Primer
cgtgactcaacgttgagtcacgc

SEQ ID NO: 6024 - DNA, 23 bp, Artificial sequence
  Primer
caggactcaacgttgagtcctgc

SEQ ID NO: 6025 - DNA, 23 bp, Artificial sequence
  Primer
ctggactcaacgttgagtccagc

SEQ ID NO: 6026 - DNA, 23 bp, Artificial sequence
  Primer
gaggactcaacgttgagtcctcg

SEQ ID NO: 6027 - DNA, 23 bp, Artificial sequence
  Primer
gtggactcaacgttgagtccacg

SEQ ID NO: 6028 - DNA, 23 bp, Artificial sequence
  Primer
accgactcaacgttgagtcggtg

SEQ ID NO: 6029 - DNA, 23 bp, Artificial sequence
  Primer
tccgactcaacgttgagtcggag

SEQ ID NO: 6030 - DNA, 23 bp, Artificial sequence
  Primer
cgggactcaacgttgagtcccgc

SEQ ID NO: 6031 - DNA, 23 bp, Artificial sequence
  Primer
agggactcaacgttgagtccctc

SEQ ID NO: 6032 - DNA, 23 bp, Artificial sequence
  Primer
tgggactcaacgttgagtcccac

SEQ ID NO: 6033 - DNA, 23 bp, Artificial sequence
  Primer
  misc_feature (1)..(3): n is a, c, g, or t
  misc_feature (20)..(23): n is a, c, g, or t
nnngactctaattagagtcnnnn

SEQ ID NO: 6034 - DNA, 23 bp, Artificial sequence
  Primer
gcggactctaattagagtccgcc

SEQ ID NO: 6035 - DNA, 23 bp, Artificial sequence
  Primer
gcggactctaattagagtccgct

SEQ ID NO: 6036 - DNA, 23 bp, Artificial sequence
  Primer
acggactctaattagagtccgtc

SEQ ID NO: 6037 - DNA, 23 bp, Artificial sequence
  Primer
gaggactctaattagagtcctcc

SEQ ID NO: 6038 - DNA, 23 bp, Artificial sequence
  Primer
gcagactctaattagagtctgcc

SEQ ID NO: 6039 - DNA, 23 bp, Artificial sequence
  Primer
gcggactctaattagagtccgca

SEQ ID NO: 6040 - DNA, 23 bp, Artificial sequence
  Primer
tcggactctaattagagtccgac

SEQ ID NO: 6041 - DNA, 23 bp, Artificial sequence
  Primer
gtggactctaattagagtccacc

SEQ ID NO: 6042 - DNA, 23 bp, Artificial sequence
  Primer
gctgactctaattagagtcagcc

SEQ ID NO: 6043 - DNA, 23 bp, Artificial sequence
  Primer
cccgactctaattagagtcgggc

SEQ ID NO: 6044 - DNA, 23 bp, Artificial sequence
  Primer
cccgactctaattagagtcgggt

SEQ ID NO: 6045 - DNA, 23 bp, Artificial sequence
  Primer
accgactctaattagagtcggtc

SEQ ID NO: 6046 - DNA, 23 bp, Artificial sequence
  Primer
cacgactctaattagagtcgtgc

SEQ ID NO: 6047 - DNA, 23 bp, Artificial sequence
  Primer
ccagactctaattagagtctggc

SEQ ID NO: 6048 - DNA, 23 bp, Artificial sequence
  Primer
cccgactctaattagagtcggga

SEQ ID NO: 6049 - DNA, 23 bp, Artificial sequence
  Primer
tccgactctaattagagtcggac

SEQ ID NO: 6050 - DNA, 23 bp, Artificial sequence
  Primer
cctgactctaattagagtcaggc

SEQ ID NO: 6051 - DNA, 23 bp, Artificial sequence
  Primer
ggcgactctaattagagtcgccc

SEQ ID NO: 6052 - DNA, 23 bp, Artificial sequence
  Primer
ggcgactctaattagagtcgcct

SEQ ID NO: 6053 - DNA, 23 bp, Artificial sequence
  Primer
agcgactctaattagagtcgctc

SEQ ID NO: 6054 - DNA, 23 bp, Artificial sequence
  Primer
gacgactctaattagagtcgtcc

SEQ ID NO: 6055 - DNA, 23 bp, Artificial sequence
  Primer
ggagactctaattagagtctccc

SEQ ID NO: 6056 - DNA, 23 bp, Artificial sequence
  Primer
ggcgactctaattagagtcgcca

SEQ ID NO: 6057 - DNA, 23 bp, Artificial sequence
  Primer
tgcgactctaattagagtcgcac

SEQ ID NO: 6058 - DNA, 23 bp, Artificial sequence
  Primer
ggtgactctaattagagtcaccc

SEQ ID NO: 6059 - DNA, 23 bp, Artificial sequence
  Primer
cgggactctaattagagtcccgt

SEQ ID NO: 6060 - DNA, 23 bp, Artificial sequence
  Primer
agggactctaattagagtccctg

SEQ ID NO: 6061 - DNA, 23 bp, Artificial sequence
  Primer
caggactctaattagagtcctgg

SEQ ID NO: 6062 - DNA, 23 bp, Artificial sequence
  Primer
cgagactctaattagagtctcgg

SEQ ID NO: 6063 - DNA, 23 bp, Artificial sequence
  Primer
cgggactctaattagagtcccga

SEQ ID NO: 6064 - DNA, 23 bp, Artificial sequence
  Primer
tgggactctaattagagtcccag

SEQ ID NO: 6065 - DNA, 23 bp, Artificial sequence
  Primer
ctggactctaattagagtccagg

SEQ ID NO: 6066 - DNA, 23 bp, Artificial sequence
  Primer
cgtgactctaattagagtcacgg

SEQ ID NO: 6067 - DNA, 23 bp, Artificial sequence
  Primer
ggcgactctaattagagtcgccg

SEQ ID NO: 6068 - DNA, 23 bp, Artificial sequence
  Primer
agcgactctaattagagtcgctg

SEQ ID NO: 6069 - DNA, 23 bp, Artificial sequence
  Primer
gacgactctaattagagtcgtcg

SEQ ID NO: 6070 - DNA, 23 bp, Artificial sequence
  Primer
ggagactctaattagagtctccg

SEQ ID NO: 6071 - DNA, 23 bp, Artificial sequence
  Primer
tgcgactctaattagagtcgcag

SEQ ID NO: 6072 - DNA, 23 bp, Artificial sequence
  Primer
ggtgactctaattagagtcaccg

SEQ ID NO: 6073 - DNA, 23 bp, Artificial sequence
  Primer
acggactctaattagagtccgtg

SEQ ID NO: 6074 - DNA, 23 bp, Artificial sequence
  Primer
ccagactctaattagagtctggg

SEQ ID NO: 6075 - DNA, 23 bp, Artificial sequence
  Primer
tcggactctaattagagtccgag

SEQ ID NO: 6076 - DNA, 23 bp, Artificial sequence
  Primer
cctgactctaattagagtcaggg

SEQ ID NO: 6077 - DNA, 23 bp, Artificial sequence
  Primer
cacgactctaattagagtcgtgg

SEQ ID NO: 6078 - DNA, 23 bp, Artificial sequence
  Primer
gccgactctaattagagtcggct

SEQ ID NO: 6079 - DNA, 23 bp, Artificial sequence
  Primer
gccgactctaattagagtcggca

SEQ ID NO: 6080 - DNA, 23 bp, Artificial sequence
  Primer
cgagactctaattagagtctcgc

SEQ ID NO: 6081 - DNA, 23 bp, Artificial sequence
  Primer
cgtgactctaattagagtcacgc

SEQ ID NO: 6082 - DNA, 23 bp, Artificial sequence
  Primer
caggactctaattagagtcctgc

SEQ ID NO: 6083 - DNA, 23 bp, Artificial sequence
  Primer
ctggactctaattagagtccagc

SEQ ID NO: 6084 - DNA, 23 bp, Artificial sequence
  Primer
gaggactctaattagagtcctcg

SEQ ID NO: 6085 - DNA, 23 bp, Artificial sequence
  Primer
gtggactctaattagagtccacg

SEQ ID NO: 6086 - DNA, 23 bp, Artificial sequence
  Primer
accgactctaattagagtcggtg

SEQ ID NO: 6087 - DNA, 23 bp, Artificial sequence
  Primer
tccgactctaattagagtcggag

SEQ ID NO: 6088 - DNA, 23 bp, Artificial sequence
  Primer
cgggactctaattagagtcccgc

SEQ ID NO: 6089 - DNA, 23 bp, Artificial sequence
  Primer
agggactctaattagagtccctc

SEQ ID NO: 6090 - DNA, 23 bp, Artificial sequence
  Primer
tgggactctaattagagtcccac

SEQ ID NO: 6091 - DNA, 23 bp, Artificial sequence
  Primer
  misc_feature (1)..(3): n is a, c, g, or t
  misc_feature (20)..(23): n is a, c, g, or t
nnngactctatatagagtcnnnn

SEQ ID NO: 6092 - DNA, 23 bp, Artificial sequence
  Primer
gcggactctatatagagtccgcc

SEQ ID NO: 6093 - DNA, 23 bp, Artificial sequence
  Primer
gcggactctatatagagtccgct

SEQ ID NO: 6094 - DNA, 23 bp, Artificial sequence
  Primer
acggactctatatagagtccgtc

SEQ ID NO: 6095 - DNA, 23 bp, Artificial sequence
  Primer
gaggactctatatagagtcctcc

SEQ ID NO: 6096 - DNA, 23 bp, Artificial sequence
  Primer
gcagactctatatagagtctgcc

SEQ ID NO: 6097 - DNA, 23 bp, Artificial sequence
  Primer
gcggactctatatagagtccgca

SEQ ID NO: 6098 - DNA, 23 bp, Artificial sequence
  Primer
tcggactctatatagagtccgac

SEQ ID NO: 6099 - DNA, 23 bp, Artificial sequence
  Primer
gtggactctatatagagtccacc

SEQ ID NO: 6100 - DNA, 23 bp, Artificial sequence
  Primer
gctgactctatatagagtcagcc

SEQ ID NO: 6101 - DNA, 23 bp, Artificial sequence
  Primer
cccgactctatatagagtcgggc

SEQ ID NO: 6102 - DNA, 23 bp, Artificial sequence
  Primer
cccgactctatatagagtcgggt

SEQ ID NO: 6103 - DNA, 23 bp, Artificial sequence
  Primer
accgactctatatagagtcggtc

SEQ ID NO: 6104 - DNA, 23 bp, Artificial sequence
  Primer
cacgactctatatagagtcgtgc

SEQ ID NO: 6105 - DNA, 23 bp, Artificial sequence
  Primer
ccagactctatatagagtctggc

SEQ ID NO: 6106 - DNA, 23 bp, Artificial sequence
  Primer
cccgactctatatagagtcggga

SEQ ID NO: 6107 - DNA, 23 bp, Artificial sequence
  Primer
tccgactctatatagagtcggac

SEQ ID NO: 6108 - DNA, 23 bp, Artificial sequence
  Primer
cctgactctatatagagtcaggc

SEQ ID NO: 6109 - DNA, 23 bp, Artificial sequence
  Primer
ggcgactctatatagagtcgccc

SEQ ID NO: 6110 - DNA, 23 bp, Artificial sequence
  Primer
ggcgactctatatagagtcgcct

SEQ ID NO: 6111 - DNA, 23 bp, Artificial sequence
  Primer
agcgactctatatagagtcgctc

SEQ ID NO: 6112 - DNA, 23 bp, Artificial sequence
  Primer
gacgactctatatagagtcgtcc

SEQ ID NO: 6113 - DNA, 23 bp, Artificial sequence
  Primer
ggagactctatatagagtctccc

SEQ ID NO: 6114 - DNA, 23 bp, Artificial sequence
  Primer
ggcgactctatatagagtcgcca

SEQ ID NO: 6115 - DNA, 23 bp, Artificial sequence
  Primer
tgcgactctatatagagtcgcac

SEQ ID NO: 6116 - DNA, 23 bp, Artificial sequence
  Primer
ggtgactctatatagagtcaccc

SEQ ID NO: 6117 - DNA, 23 bp, Artificial sequence
  Primer
cgggactctatatagagtcccgt

SEQ ID NO: 6118 - DNA, 23 bp, Artificial sequence
  Primer
agggactctatatagagtccctg

SEQ ID NO: 6119 - DNA, 23 bp, Artificial sequence
  Primer
caggactctatatagagtcctgg

SEQ ID NO: 6120 - DNA, 23 bp, Artificial sequence
  Primer
cgagactctatatagagtctcgg

SEQ ID NO: 6121 - DNA, 23 bp, Artificial sequence
  Primer
cgggactctatatagagtcccga

SEQ ID NO: 6122 - DNA, 23 bp, Artificial sequence
  Primer
tgggactctatatagagtcccag

SEQ ID NO: 6123 - DNA, 23 bp, Artificial sequence
  Primer
ctggactctatatagagtccagg

SEQ ID NO: 6124 - DNA, 23 bp, Artificial sequence
  Primer
cgtgactctatatagagtcacgg

SEQ ID NO: 6125 - DNA, 23 bp, Artificial sequence
  Primer
ggcgactctatatagagtcgccg

SEQ ID NO: 6126 - DNA, 23 bp, Artificial sequence
  Primer
agcgactctatatagagtcgctg

SEQ ID NO: 6127 - DNA, 23 bp, Artificial sequence
  Primer
gacgactctatatagagtcgtcg

SEQ ID NO: 6128 - DNA, 23 bp, Artificial sequence
  Primer
ggagactctatatagagtctccg

SEQ ID NO: 6129 - DNA, 23 bp, Artificial sequence
  Primer
tgcgactctatatagagtcgcag

SEQ ID NO: 6130 - DNA, 23 bp, Artificial sequence
  Primer
ggtgactctatatagagtcaccg

SEQ ID NO: 6131 - DNA, 23 bp, Artificial sequence
  Primer
acggactctatatagagtccgtg

SEQ ID NO: 6132 - DNA, 23 bp, Artificial sequence
  Primer
ccagactctatatagagtctggg

SEQ ID NO: 6133 - DNA, 23 bp, Artificial sequence
  Primer
tcggactctatatagagtccgag

SEQ ID NO: 6134 - DNA, 23 bp, Artificial sequence
  Primer
cctgactctatatagagtcaggg

SEQ ID NO: 6135 - DNA, 23 bp, Artificial sequence
  Primer
cacgactctatatagagtcgtgg

SEQ ID NO: 6136 - DNA, 23 bp, Artificial sequence
  Primer
gccgactctatatagagtcggct

SEQ ID NO: 6137 - DNA, 23 bp, Artificial sequence
  Primer
gccgactctatatagagtcggca

SEQ ID NO: 6138 - DNA, 23 bp, Artificial sequence
  Primer
cgagactctatatagagtctcgc

SEQ ID NO: 6139 - DNA, 23 bp, Artificial sequence
  Primer
cgtgactctatatagagtcacgc

SEQ ID NO: 6140 - DNA, 23 bp, Artificial sequence
  Primer
caggactctatatagagtcctgc

SEQ ID NO: 6141 - DNA, 23 bp, Artificial sequence
  Primer
ctggactctatatagagtccagc

SEQ ID NO: 6142 - DNA, 23 bp, Artificial sequence
  Primer
gaggactctatatagagtcctcg

SEQ ID NO: 6143 - DNA, 23 bp, Artificial sequence
  Primer
gtggactctatatagagtccacg

SEQ ID NO: 6144 - DNA, 23 bp, Artificial sequence
  Primer
accgactctatatagagtcggtg

SEQ ID NO: 6145 - DNA, 23 bp, Artificial sequence
  Primer
tccgactctatatagagtcggag

SEQ ID NO: 6146 - DNA, 23 bp, Artificial sequence
  Primer
cgggactctatatagagtcccgc

SEQ ID NO: 6147 - DNA, 23 bp, Artificial sequence
  Primer
agggactctatatagagtccctc

SEQ ID NO: 6148 - DNA, 23 bp, Artificial sequence
  Primer
tgggactctatatagagtcccac

SEQ ID NO: 6149 - DNA, 23 bp, Artificial sequence
  Primer
  misc_feature (1)..(3): n is a, c, g, or t
  misc_feature (20)..(23): n is a, c, g, or t
nnngactctagctagagtcnnnn

SEQ ID NO: 6150 - DNA, 23 bp, Artificial sequence
  Primer
gcggactctagctagagtccgcc

SEQ ID NO: 6151 - DNA, 23 bp, Artificial sequence
  Primer
gcggactctagctagagtccgct

SEQ ID NO: 6152 - DNA, 23 bp, Artificial sequence
  Primer
acggactctagctagagtccgtc

SEQ ID NO: 6153 - DNA, 23 bp, Artificial sequence
  Primer
gaggactctagctagagtcctcc

SEQ ID NO: 6154 - DNA, 23 bp, Artificial sequence
  Primer
gcagactctagctagagtctgcc

SEQ ID NO: 6155 - DNA, 23 bp, Artificial sequence
  Primer
gcggactctagctagagtccgca

SEQ ID NO: 6156 - DNA, 23 bp, Artificial sequence
  Primer
tcggactctagctagagtccgac

SEQ ID NO: 6157 - DNA, 23 bp, Artificial sequence
  Primer
gtggactctagctagagtccacc

SEQ ID NO: 6158 - DNA, 23 bp, Artificial sequence
  Primer
gctgactctagctagagtcagcc

SEQ ID NO: 6159 - DNA, 23 bp, Artificial sequence
  Primer
cccgactctagctagagtcgggc

SEQ ID NO: 6160 - DNA, 23 bp, Artificial sequence
  Primer
cccgactctagctagagtcgggt

SEQ ID NO: 6161 - DNA, 23 bp, Artificial sequence
  Primer
accgactctagctagagtcggtc

SEQ ID NO: 6162 - DNA, 23 bp, Artificial sequence
  Primer
cacgactctagctagagtcgtgc

SEQ ID NO: 6163 - DNA, 23 bp, Artificial sequence
  Primer
ccagactctagctagagtctggc

SEQ ID NO: 6164 - DNA, 23 bp, Artificial sequence
  Primer
cccgactctagctagagtcggga

SEQ ID NO: 6165 - DNA, 23 bp, Artificial sequence
  Primer
tccgactctagctagagtcggac

SEQ ID NO: 6166 - DNA, 23 bp, Artificial sequence
  Primer
cctgactctagctagagtcaggc

SEQ ID NO: 6167 - DNA, 23 bp, Artificial sequence
  Primer
ggcgactctagctagagtcgccc

SEQ ID NO: 6168 - DNA, 23 bp, Artificial sequence
  Primer
ggcgactctagctagagtcgcct

SEQ ID NO: 6169 - DNA, 23 bp, Artificial sequence
  Primer
agcgactctagctagagtcgctc

SEQ ID NO: 6170 - DNA, 23 bp, Artificial sequence
  Primer
gacgactctagctagagtcgtcc

SEQ ID NO: 6171 - DNA, 23 bp, Artificial sequence
  Primer
ggagactctagctagagtctccc

SEQ ID NO: 6172 - DNA, 23 bp, Artificial sequence
  Primer
ggcgactctagctagagtcgcca

SEQ ID NO: 6173 - DNA, 23 bp, Artificial sequence
  Primer
tgcgactctagctagagtcgcac

SEQ ID NO: 6174 - DNA, 23 bp, Artificial sequence
  Primer
ggtgactctagctagagtcaccc

SEQ ID NO: 6175 - DNA, 23 bp, Artificial sequence
  Primer
cgggactctagctagagtcccgt

SEQ ID NO: 6176 - DNA, 23 bp, Artificial sequence
  Primer
agggactctagctagagtccctg

SEQ ID NO: 6177 - DNA, 23 bp, Artificial sequence
  Primer
caggactctagctagagtcctgg

SEQ ID NO: 6178 - DNA, 23 bp, Artificial sequence
  Primer
cgagactctagctagagtctcgg

SEQ ID NO: 6179 - DNA, 23 bp, Artificial sequence
  Primer
cgggactctagctagagtcccga

SEQ ID NO: 6180 - DNA, 23 bp, Artificial sequence
  Primer
tgggactctagctagagtcccag

SEQ ID NO: 6181 - DNA, 23 bp, Artificial sequence
  Primer
ctggactctagctagagtccagg

SEQ ID NO: 6182 - DNA, 23 bp, Artificial sequence
  Primer
cgtgactctagctagagtcacgg

SEQ ID NO: 6183 - DNA, 23 bp, Artificial sequence
  Primer
ggcgactctagctagagtcgccg

SEQ ID NO: 6184 - DNA, 23 bp, Artificial sequence
  Primer
agcgactctagctagagtcgctg

SEQ ID NO: 6185 - DNA, 23 bp, Artificial sequence
  Primer
gacgactctagctagagtcgtcg

SEQ ID NO: 6186 - DNA, 23 bp, Artificial sequence
  Primer
ggagactctagctagagtctccg

SEQ ID NO: 6187 - DNA, 23 bp, Artificial sequence
  Primer
tgcgactctagctagagtcgcag

SEQ ID NO: 6188 - DNA, 23 bp, Artificial sequence
  Primer
ggtgactctagctagagtcaccg

SEQ ID NO: 6189 - DNA, 23 bp, Artificial sequence
  Primer
acggactctagctagagtccgtg

SEQ ID NO: 6190 - DNA, 23 bp, Artificial sequence
  Primer
ccagactctagctagagtctggg

SEQ ID NO: 6191 - DNA, 23 bp, Artificial sequence
  Primer
tcggactctagctagagtccgag

SEQ ID NO: 6192 - DNA, 23 bp, Artificial sequence
  Primer
cctgactctagctagagtcaggg

SEQ ID NO: 6193 - DNA, 23 bp, Artificial sequence
  Primer
cacgactctagctagagtcgtgg

SEQ ID NO: 6194 - DNA, 23 bp, Artificial sequence
  Primer
gccgactctagctagagtcggct

SEQ ID NO: 6195 - DNA, 23 bp, Artificial sequence
  Primer
gccgactctagctagagtcggca

SEQ ID NO: 6196 - DNA, 23 bp, Artificial sequence
  Primer
cgagactctagctagagtctcgc

SEQ ID NO: 6197 - DNA, 23 bp, Artificial sequence
  Primer
cgtgactctagctagagtcacgc

SEQ ID NO: 6198 - DNA, 23 bp, Artificial sequence
  Primer
caggactctagctagagtcctgc

SEQ ID NO: 6199 - DNA, 23 bp, Artificial sequence
  Primer
ctggactctagctagagtccagc

SEQ ID NO: 6200 - DNA, 23 bp, Artificial sequence
  Primer
gaggactctagctagagtcctcg

SEQ ID NO: 6201 - DNA, 23 bp, Artificial sequence
  Primer
gtggactctagctagagtccacg

SEQ ID NO: 6202 - DNA, 23 bp, Artificial sequence
  Primer
accgactctagctagagtcggtg

SEQ ID NO: 6203 - DNA, 23 bp, Artificial sequence
  Primer
tccgactctagctagagtcggag

SEQ ID NO: 6204 - DNA, 23 bp, Artificial sequence
  Primer
cgggactctagctagagtcccgc

SEQ ID NO: 6205 - DNA, 23 bp, Artificial sequence
  Primer
agggactctagctagagtccctc

SEQ ID NO: 6206 - DNA, 23 bp, Artificial sequence
  Primer
tgggactctagctagagtcccac

SEQ ID NO: 6207 - DNA, 23 bp, Artificial sequence
  Primer
  misc_feature (1)..(3): n is a, c, g, or t
  misc_feature (20)..(23): n is a, c, g, or t
nnngactctacgtagagtcnnnn

SEQ ID NO: 6208 - DNA, 23 bp, Artificial sequence
  Primer
gcggactctacgtagagtccgcc

SEQ ID NO: 6209 - DNA, 23 bp, Artificial sequence
  Primer
gcggactctacgtagagtccgct

SEQ ID NO: 6210 - DNA, 23 bp, Artificial sequence
  Primer
acggactctacgtagagtccgtc

SEQ ID NO: 6211 - DNA, 23 bp, Artificial sequence
  Primer
gaggactctacgtagagtcctcc

SEQ ID NO: 6212 - DNA, 23 bp, Artificial sequence
  Primer
gcagactctacgtagagtctgcc

SEQ ID NO: 6213 - DNA, 23 bp, Artificial sequence
  Primer
gcggactctacgtagagtccgca

SEQ ID NO: 6214 - DNA, 23 bp, Artificial sequence
  Primer
tcggactctacgtagagtccgac

SEQ ID NO: 6215 - DNA, 23 bp, Artificial sequence
  Primer
gtggactctacgtagagtccacc

SEQ ID NO: 6216 - DNA, 23 bp, Artificial sequence
  Primer
gctgactctacgtagagtcagcc

SEQ ID NO: 6217 - DNA, 23 bp, Artificial sequence
  Primer
cccgactctacgtagagtcgggc

SEQ ID NO: 6218 - DNA, 23 bp, Artificial sequence
  Primer
cccgactctacgtagagtcgggt

SEQ ID NO: 6219 - DNA, 23 bp, Artificial sequence
  Primer
accgactctacgtagagtcggtc

SEQ ID NO: 6220 - DNA, 23 bp, Artificial sequence
  Primer
cacgactctacgtagagtcgtgc

SEQ ID NO: 6221 - DNA, 23 bp, Artificial sequence
  Primer
ccagactctacgtagagtctggc

SEQ ID NO: 6222 - DNA, 23 bp, Artificial sequence
  Primer
cccgactctacgtagagtcggga

SEQ ID NO: 6223 - DNA, 23 bp, Artificial sequence
  Primer
tccgactctacgtagagtcggac

SEQ ID NO: 6224 - DNA, 23 bp, Artificial sequence
  Primer
cctgactctacgtagagtcaggc

SEQ ID NO: 6225 - DNA, 23 bp, Artificial sequence
  Primer
ggcgactctacgtagagtcgccc

SEQ ID NO: 6226 - DNA, 23 bp, Artificial sequence
  Primer
ggcgactctacgtagagtcgcct

SEQ ID NO: 6227 - DNA, 23 bp, Artificial sequence
  Primer
agcgactctacgtagagtcgctc

SEQ ID NO: 6228 - DNA, 23 bp, Artificial sequence
  Primer
gacgactctacgtagagtcgtcc

SEQ ID NO: 6229 - DNA, 23 bp, Artificial sequence
  Primer
ggagactctacgtagagtctccc

SEQ ID NO: 6230 - DNA, 23 bp, Artificial sequence
  Primer
ggcgactctacgtagagtcgcca

SEQ ID NO: 6231 - DNA, 23 bp, Artificial sequence
  Primer
tgcgactctacgtagagtcgcac

SEQ ID NO: 6232 - DNA, 23 bp, Artificial sequence
  Primer
ggtgactctacgtagagtcaccc

SEQ ID NO: 6233 - DNA, 23 bp, Artificial sequence
  Primer
cgggactctacgtagagtcccgt

SEQ ID NO: 6234 - DNA, 23 bp, Artificial sequence
  Primer
agggactctacgtagagtccctg

SEQ ID NO: 6235 - DNA, 23 bp, Artificial sequence
  Primer
caggactctacgtagagtcctgg

SEQ ID NO: 6236 - DNA, 23 bp, Artificial sequence
  Primer
cgagactctacgtagagtctcgg

SEQ ID NO: 6237 - DNA, 23 bp, Artificial sequence
  Primer
cgggactctacgtagagtcccga

SEQ ID NO: 6238 - DNA, 23 bp, Artificial sequence
  Primer
tgggactctacgtagagtcccag

SEQ ID NO: 6239 - DNA, 23 bp, Artificial sequence
  Primer
ctggactctacgtagagtccagg

SEQ ID NO: 6240 - DNA, 23 bp, Artificial sequence
  Primer
cgtgactctacgtagagtcacgg

SEQ ID NO: 6241 - DNA, 23 bp, Artificial sequence
  Primer
ggcgactctacgtagagtcgccg

SEQ ID NO: 6242 - DNA, 23 bp, Artificial sequence
  Primer
agcgactctacgtagagtcgctg

SEQ ID NO: 6243 - DNA, 23 bp, Artificial sequence
  Primer
gacgactctacgtagagtcgtcg

SEQ ID NO: 6244 - DNA, 23 bp, Artificial sequence
  Primer
ggagactctacgtagagtctccg

SEQ ID NO: 6245 - DNA, 23 bp, Artificial sequence
  Primer
tgcgactctacgtagagtcgcag

SEQ ID NO: 6246 - DNA, 23 bp, Artificial sequence
  Primer
ggtgactctacgtagagtcaccg

SEQ ID NO: 6247 - DNA, 23 bp, Artificial sequence
  Primer
acggactctacgtagagtccgtg

SEQ ID NO: 6248 - DNA, 23 bp, Artificial sequence
  Primer
ccagactctacgtagagtctggg

SEQ ID NO: 6249 - DNA, 23 bp, Artificial sequence
  Primer
tcggactctacgtagagtccgag

SEQ ID NO: 6250 - DNA, 23 bp, Artificial sequence
  Primer
cctgactctacgtagagtcaggg

SEQ ID NO: 6251 - DNA, 23 bp, Artificial sequence
  Primer
cacgactctacgtagagtcgtgg

SEQ ID NO: 6252 - DNA, 23 bp, Artificial sequence
  Primer
gccgactctacgtagagtcggct

SEQ ID NO: 6253 - DNA, 23 bp, Artificial sequence
  Primer
gccgactctacgtagagtcggca

SEQ ID NO: 6254 - DNA, 23 bp, Artificial sequence
  Primer
cgagactctacgtagagtctcgc

SEQ ID NO: 6255 - DNA, 23 bp, Artificial sequence
  Primer
cgtgactctacgtagagtcacgc

SEQ ID NO: 6256 - DNA, 23 bp, Artificial sequence
  Primer
caggactctacgtagagtcctgc

SEQ ID NO: 6257 - DNA, 23 bp, Artificial sequence
  Primer
ctggactctacgtagagtccagc

SEQ ID NO: 6258 - DNA, 23 bp, Artificial sequence
  Primer
gaggactctacgtagagtcctcg

SEQ ID NO: 6259 - DNA, 23 bp, Artificial sequence
  Primer
gtggactctacgtagagtccacg

SEQ ID NO: 6260 - DNA, 23 bp, Artificial sequence
  Primer
accgactctacgtagagtcggtg

SEQ ID NO: 6261 - DNA, 23 bp, Artificial sequence
  Primer
tccgactctacgtagagtcggag

SEQ ID NO: 6262 - DNA, 23 bp, Artificial sequence
  Primer
cgggactctacgtagagtcccgc

SEQ ID NO: 6263 - DNA, 23 bp, Artificial sequence
  Primer
agggactctacgtagagtccctc

SEQ ID NO: 6264 - DNA, 23 bp, Artificial sequence
  Primer
tgggactctacgtagagtcccac

SEQ ID NO: 6265 - DNA, 23 bp, Artificial sequence
  Primer
  misc_feature (1)..(3): n is a, c, g, or t
  misc_feature (20)..(23): n is a, c, g, or t
nnngactcatatatgagtcnnnn

SEQ ID NO: 6266 - DNA, 23 bp, Artificial sequence
  Primer
gcggactcatatatgagtccgcc

SEQ ID NO: 6267 - DNA, 23 bp, Artificial sequence
  Primer
gcggactcatatatgagtccgct

SEQ ID NO: 6268 - DNA, 23 bp, Artificial sequence
  Primer
acggactcatatatgagtccgtc

SEQ ID NO: 6269 - DNA, 23 bp, Artificial sequence
  Primer
gaggactcatatatgagtcctcc

SEQ ID NO: 6270 - DNA, 23 bp, Artificial sequence
  Primer
gcagactcatatatgagtctgcc

SEQ ID NO: 6271 - DNA, 23 bp, Artificial sequence
  Primer
gcggactcatatatgagtccgca

SEQ ID NO: 6272 - DNA, 23 bp, Artificial sequence
  Primer
tcggactcatatatgagtccgac

SEQ ID NO: 6273 - DNA, 23 bp, Artificial sequence
  Primer
gtggactcatatatgagtccacc

SEQ ID NO: 6274 - DNA, 23 bp, Artificial sequence
  Primer
gctgactcatatatgagtcagcc

SEQ ID NO: 6275 - DNA, 23 bp, Artificial sequence
  Primer
cccgactcatatatgagtcgggc

SEQ ID NO: 6276 - DNA, 23 bp, Artificial sequence
  Primer
cccgactcatatatgagtcgggt

SEQ ID NO: 6277 - DNA, 23 bp, Artificial sequence
  Primer
accgactcatatatgagtcggtc

SEQ ID NO: 6278 - DNA, 23 bp, Artificial sequence
  Primer
cacgactcatatatgagtcgtgc

SEQ ID NO: 6279 - DNA, 23 bp, Artificial sequence
  Primer
ccagactcatatatgagtctggc

SEQ ID NO: 6280 - DNA, 23 bp, Artificial sequence
  Primer
cccgactcatatatgagtcggga

SEQ ID NO: 6281 - DNA, 23 bp, Artificial sequence
  Primer
tccgactcatatatgagtcggac

SEQ ID NO: 6282 - DNA, 23 bp, Artificial sequence
  Primer
cctgactcatatatgagtcaggc

SEQ ID NO: 6283 - DNA, 23 bp, Artificial sequence
  Primer
ggcgactcatatatgagtcgccc

SEQ ID NO: 6284 - DNA, 23 bp, Artificial sequence
  Primer
ggcgactcatatatgagtcgcct

SEQ ID NO: 6285 - DNA, 23 bp, Artificial sequence
  Primer
agcgactcatatatgagtcgctc

SEQ ID NO: 6286 - DNA, 23 bp, Artificial sequence
  Primer
gacgactcatatatgagtcgtcc

SEQ ID NO: 6287 - DNA, 23 bp, Artificial sequence
  Primer
ggagactcatatatgagtctccc

SEQ ID NO: 6288 - DNA, 23 bp, Artificial sequence
  Primer
ggcgactcatatatgagtcgcca

SEQ ID NO: 6289 - DNA, 23 bp, Artificial sequence
  Primer
tgcgactcatatatgagtcgcac

SEQ ID NO: 6290 - DNA, 23 bp, Artificial sequence
  Primer
ggtgactcatatatgagtcaccc

SEQ ID NO: 6291 - DNA, 23 bp, Artificial sequence
  Primer
cgggactcatatatgagtcccgt

SEQ ID NO: 6292 - DNA, 23 bp, Artificial sequence
  Primer
agggactcatatatgagtccctg

SEQ ID NO: 6293 - DNA, 23 bp, Artificial sequence
  Primer
caggactcatatatgagtcctgg

SEQ ID NO: 6294 - DNA, 23 bp, Artificial sequence
  Primer
cgagactcatatatgagtctcgg

SEQ ID NO: 6295 - DNA, 23 bp, Artificial sequence
  Primer
cgggactcatatatgagtcccga

SEQ ID NO: 6296 - DNA, 23 bp, Artificial sequence
  Primer
tgggactcatatatgagtcccag

SEQ ID NO: 6297 - DNA, 23 bp, Artificial sequence
  Primer
ctggactcatatatgagtccagg

SEQ ID NO: 6298 - DNA, 23 bp, Artificial sequence
  Primer
cgtgactcatatatgagtcacgg

SEQ ID NO: 6299 - DNA, 23 bp, Artificial sequence
  Primer
ggcgactcatatatgagtcgccg

SEQ ID NO: 6300 - DNA, 23 bp, Artificial sequence
  Primer
agcgactcatatatgagtcgctg

SEQ ID NO: 6301 - DNA, 23 bp, Artificial sequence
  Primer
gacgactcatatatgagtcgtcg

SEQ ID NO: 6302 - DNA, 23 bp, Artificial sequence
  Primer
ggagactcatatatgagtctccg

SEQ ID NO: 6303 - DNA, 23 bp, Artificial sequence
  Primer
tgcgactcatatatgagtcgcag

SEQ ID NO: 6304 - DNA, 23 bp, Artificial sequence
  Primer
ggtgactcatatatgagtcaccg

SEQ ID NO: 6305 - DNA, 23 bp, Artificial sequence
  Primer
acggactcatatatgagtccgtg

SEQ ID NO: 6306 - DNA, 23 bp, Artificial sequence
  Primer
ccagactcatatatgagtctggg

SEQ ID NO: 6307 - DNA, 23 bp, Artificial sequence
  Primer
tcggactcatatatgagtccgag

SEQ ID NO: 6308 - DNA, 23 bp, Artificial sequence
  Primer
cctgactcatatatgagtcaggg

SEQ ID NO: 6309 - DNA, 23 bp, Artificial sequence
  Primer
cacgactcatatatgagtcgtgg

SEQ ID NO: 6310 - DNA, 23 bp, Artificial sequence
  Primer
gccgactcatatatgagtcggct

SEQ ID NO: 6311 - DNA, 23 bp, Artificial sequence
  Primer
gccgactcatatatgagtcggca

SEQ ID NO: 6312 - DNA, 23 bp, Artificial sequence
  Primer
cgagactcatatatgagtctcgc

SEQ ID NO: 6313 - DNA, 23 bp, Artificial sequence
  Primer
cgtgactcatatatgagtcacgc

SEQ ID NO: 6314 - DNA, 23 bp, Artificial sequence
  Primer
caggactcatatatgagtcctgc

SEQ ID NO: 6315 - DNA, 23 bp, Artificial sequence
  Primer
ctggactcatatatgagtccagc

SEQ ID NO: 6316 - DNA, 23 bp, Artificial sequence
  Primer
gaggactcatatatgagtcctcg

SEQ ID NO: 6317 - DNA, 23 bp, Artificial sequence
  Primer
gtggactcatatatgagtccacg

SEQ ID NO: 6318 - DNA, 23 bp, Artificial sequence
  Primer
accgactcatatatgagtcggtg

SEQ ID NO: 6319 - DNA, 23 bp, Artificial sequence
  Primer
tccgactcatatatgagtcggag

SEQ ID NO: 6320 - DNA, 23 bp, Artificial sequence
  Primer
cgggactcatatatgagtcccgc

SEQ ID NO: 6321 - DNA, 23 bp, Artificial sequence
  Primer
agggactcatatatgagtccctc

SEQ ID NO: 6322 - DNA, 23 bp, Artificial sequence
  Primer
tgggactcatatatgagtcccac

SEQ ID NO: 6323 - DNA, 23 bp, Artificial sequence
  Primer
  misc_feature (1)..(3): n is a, c, g, or t
  misc_feature (20)..(23): n is a, c, g, or t
nnngactcattaatgagtcnnnn

SEQ ID NO: 6324 - DNA, 23 bp, Artificial sequence
  Primer
gcggactcattaatgagtccgcc

SEQ ID NO: 6325 - DNA, 23 bp, Artificial sequence
  Primer
gcggactcattaatgagtccgct

SEQ ID NO: 6326 - DNA, 23 bp, Artificial sequence
  Primer
acggactcattaatgagtccgtc

SEQ ID NO: 6327 - DNA, 23 bp, Artificial sequence
  Primer
gaggactcattaatgagtcctcc

SEQ ID NO: 6328 - DNA, 23 bp, Artificial sequence
  Primer
gcagactcattaatgagtctgcc

SEQ ID NO: 6329 - DNA, 23 bp, Artificial sequence
  Primer
gcggactcattaatgagtccgca

SEQ ID NO: 6330 - DNA, 23 bp, Artificial sequence
  Primer
tcggactcattaatgagtccgac

SEQ ID NO: 6331 - DNA, 23 bp, Artificial sequence
  Primer
gtggactcattaatgagtccacc

SEQ ID NO: 6332 - DNA, 23 bp, Artificial sequence
  Primer
gctgactcattaatgagtcagcc

SEQ ID NO: 6333 - DNA, 23 bp, Artificial sequence
  Primer
cccgactcattaatgagtcgggc

SEQ ID NO: 6334 - DNA, 23 bp, Artificial sequence
  Primer
cccgactcattaatgagtcgggt

SEQ ID NO: 6335 - DNA, 23 bp, Artificial sequence
  Primer
accgactcattaatgagtcggtc

SEQ ID NO: 6336 - DNA, 23 bp, Artificial sequence
  Primer
cacgactcattaatgagtcgtgc

SEQ ID NO: 6337 - DNA, 23 bp, Artificial sequence
  Primer
ccagactcattaatgagtctggc

SEQ ID NO: 6338 - DNA, 23 bp, Artificial sequence
  Primer
cccgactcattaatgagtcggga

SEQ ID NO: 6339 - DNA, 23 bp, Artificial sequence
  Primer
tccgactcattaatgagtcggac

SEQ ID NO: 6340 - DNA, 23 bp, Artificial sequence
  Primer
cctgactcattaatgagtcaggc

SEQ ID NO: 6341 - DNA, 23 bp, Artificial sequence
  Primer
ggcgactcattaatgagtcgccc

SEQ ID NO: 6342 - DNA, 23 bp, Artificial sequence
  Primer
ggcgactcattaatgagtcgcct

SEQ ID NO: 6343 - DNA, 23 bp, Artificial sequence
  Primer
agcgactcattaatgagtcgctc

SEQ ID NO: 6344 - DNA, 23 bp, Artificial sequence
  Primer
gacgactcattaatgagtcgtcc

SEQ ID NO: 6345 - DNA, 23 bp, Artificial sequence
  Primer
ggagactcattaatgagtctccc

SEQ ID NO: 6346 - DNA, 23 bp, Artificial sequence
  Primer
ggcgactcattaatgagtcgcca

SEQ ID NO: 6347 - DNA, 23 bp, Artificial sequence
  Primer
tgcgactcattaatgagtcgcac

SEQ ID NO: 6348 - DNA, 23 bp, Artificial sequence
  Primer
ggtgactcattaatgagtcaccc

SEQ ID NO: 6349 - DNA, 23 bp, Artificial sequence
  Primer
cgggactcattaatgagtcccgt

SEQ ID NO: 6350 - DNA, 23 bp, Artificial sequence
  Primer
agggactcattaatgagtccctg

SEQ ID NO: 6351 - DNA, 23 bp, Artificial sequence
  Primer
caggactcattaatgagtcctgg

SEQ ID NO: 6352 - DNA, 23 bp, Artificial sequence
  Primer
cgagactcattaatgagtctcgg

SEQ ID NO: 6353 - DNA, 23 bp, Artificial sequence
  Primer
cgggactcattaatgagtcccga

SEQ ID NO: 6354 - DNA, 23 bp, Artificial sequence
  Primer
tgggactcattaatgagtcccag

SEQ ID NO: 6355 - DNA, 23 bp, Artificial sequence
  Primer
ctggactcattaatgagtccagg

SEQ ID NO: 6356 - DNA, 23 bp, Artificial sequence
  Primer
cgtgactcattaatgagtcacgg

SEQ ID NO: 6357 - DNA, 23 bp, Artificial sequence
  Primer
ggcgactcattaatgagtcgccg

SEQ ID NO: 6358 - DNA, 23 bp, Artificial sequence
  Primer
agcgactcattaatgagtcgctg

SEQ ID NO: 6359 - DNA, 23 bp, Artificial sequence
  Primer
gacgactcattaatgagtcgtcg

SEQ ID NO: 6360 - DNA, 23 bp, Artificial sequence
  Primer
ggagactcattaatgagtctccg

SEQ ID NO: 6361 - DNA, 23 bp, Artificial sequence
  Primer
tgcgactcattaatgagtcgcag

SEQ ID NO: 6362 - DNA, 23 bp, Artificial sequence
  Primer
ggtgactcattaatgagtcaccg

SEQ ID NO: 6363 - DNA, 23 bp, Artificial sequence
  Primer
acggactcattaatgagtccgtg

SEQ ID NO: 6364 - DNA, 23 bp, Artificial sequence
  Primer
ccagactcattaatgagtctggg

SEQ ID NO: 6365 - DNA, 23 bp, Artificial sequence
  Primer
tcggactcattaatgagtccgag

SEQ ID NO: 6366 - DNA, 23 bp, Artificial sequence
  Primer
cctgactcattaatgagtcaggg

SEQ ID NO: 6367 - DNA, 23 bp, Artificial sequence
  Primer
cacgactcattaatgagtcgtgg

SEQ ID NO: 6368 - DNA, 23 bp, Artificial sequence
  Primer
gccgactcattaatgagtcggct

SEQ ID NO: 6369 - DNA, 23 bp, Artificial sequence
  Primer
gccgactcattaatgagtcggca

SEQ ID NO: 6370 - DNA, 23 bp, Artificial sequence
  Primer
cgagactcattaatgagtctcgc

SEQ ID NO: 6371 - DNA, 23 bp, Artificial sequence
  Primer
cgtgactcattaatgagtcacgc

SEQ ID NO: 6372 - DNA, 23 bp, Artificial sequence
  Primer
caggactcattaatgagtcctgc

SEQ ID NO: 6373 - DNA, 23 bp, Artificial sequence
  Primer
ctggactcattaatgagtccagc

SEQ ID NO: 6374 - DNA, 23 bp, Artificial sequence
  Primer
gaggactcattaatgagtcctcg

SEQ ID NO: 6375 - DNA, 23 bp, Artificial sequence
  Primer
gtggactcattaatgagtccacg

SEQ ID NO: 6376 - DNA, 23 bp, Artificial sequence
  Primer
accgactcattaatgagtcggtg

SEQ ID NO: 6377 - DNA, 23 bp, Artificial sequence
  Primer
tccgactcattaatgagtcggag

SEQ ID NO: 6378 - DNA, 23 bp, Artificial sequence
  Primer
cgggactcattaatgagtcccgc

SEQ ID NO: 6379 - DNA, 23 bp, Artificial sequence
  Primer
agggactcattaatgagtccctc

SEQ ID NO: 6380 - DNA, 23 bp, Artificial sequence
  Primer
tgggactcattaatgagtcccac

SEQ ID NO: 6381 - DNA, 23 bp, Artificial sequence
  Primer
  misc_feature (1)..(3): n is a, c, g, or t
  misc_feature (20)..(23): n is a, c, g, or t
nnngactcatgcatgagtcnnnn

SEQ ID NO: 6382 - DNA, 23 bp, Artificial sequence
  Primer
gcggactcatgcatgagtccgcc

SEQ ID NO: 6383 - DNA, 23 bp, Artificial sequence
  Primer
gcggactcatgcatgagtccgct

SEQ ID NO: 6384 - DNA, 23 bp, Artificial sequence
  Primer
acggactcatgcatgagtccgtc

SEQ ID NO: 6385 - DNA, 23 bp, Artificial sequence
  Primer
gaggactcatgcatgagtcctcc

SEQ ID NO: 6386 - DNA, 23 bp, Artificial sequence
  Primer
gcagactcatgcatgagtctgcc

SEQ ID NO: 6387 - DNA, 23 bp, Artificial sequence
  Primer
gcggactcatgcatgagtccgca

SEQ ID NO: 6388 - DNA, 23 bp, Artificial sequence
  Primer
tcggactcatgcatgagtccgac

SEQ ID NO: 6389 - DNA, 23 bp, Artificial sequence
  Primer
gtggactcatgcatgagtccacc

SEQ ID NO: 6390 - DNA, 23 bp, Artificial sequence
  Primer
gctgactcatgcatgagtcagcc

SEQ ID NO: 6391 - DNA, 23 bp, Artificial sequence
  Primer
cccgactcatgcatgagtcgggc

SEQ ID NO: 6392 - DNA, 23 bp, Artificial sequence
  Primer
cccgactcatgcatgagtcgggt

SEQ ID NO: 6393 - DNA, 23 bp, Artificial sequence
  Primer
accgactcatgcatgagtcggtc

SEQ ID NO: 6394 - DNA, 23 bp, Artificial sequence
  Primer
cacgactcatgcatgagtcgtgc

SEQ ID NO: 6395 - DNA, 23 bp, Artificial sequence
  Primer
ccagactcatgcatgagtctggc

SEQ ID NO: 6396 - DNA, 23 bp, Artificial sequence
  Primer
cccgactcatgcatgagtcggga

SEQ ID NO: 6397 - DNA, 23 bp, Artificial sequence
  Primer
tccgactcatgcatgagtcggac

SEQ ID NO: 6398 - DNA, 23 bp, Artificial sequence
  Primer
cctgactcatgcatgagtcaggc

SEQ ID NO: 6399 - DNA, 23 bp, Artificial sequence
  Primer
ggcgactcatgcatgagtcgccc

SEQ ID NO: 6400 - DNA, 23 bp, Artificial sequence
  Primer
ggcgactcatgcatgagtcgcct

SEQ ID NO: 6401 - DNA, 23 bp, Artificial sequence
  Primer
agcgactcatgcatgagtcgctc

SEQ ID NO: 6402 - DNA, 23 bp, Artificial sequence
  Primer
gacgactcatgcatgagtcgtcc

SEQ ID NO: 6403 - DNA, 23 bp, Artificial sequence
  Primer
ggagactcatgcatgagtctccc

SEQ ID NO: 6404 - DNA, 23 bp, Artificial sequence
  Primer
ggcgactcatgcatgagtcgcca

SEQ ID NO: 6405 - DNA, 23 bp, Artificial sequence
  Primer
tgcgactcatgcatgagtcgcac

SEQ ID NO: 6406 - DNA, 23 bp, Artificial sequence
  Primer
ggtgactcatgcatgagtcaccc

SEQ ID NO: 6407 - DNA, 23 bp, Artificial sequence
  Primer
cgggactcatgcatgagtcccgt

SEQ ID NO: 6408 - DNA, 23 bp, Artificial sequence
  Primer
agggactcatgcatgagtccctg

SEQ ID NO: 6409 - DNA, 23 bp, Artificial sequence
  Primer
caggactcatgcatgagtcctgg

SEQ ID NO: 6410 - DNA, 23 bp, Artificial sequence
  Primer
cgagactcatgcatgagtctcgg

SEQ ID NO: 6411 - DNA, 23 bp, Artificial sequence
  Primer
cgggactcatgcatgagtcccga

SEQ ID NO: 6412 - DNA, 23 bp, Artificial sequence
  Primer
tgggactcatgcatgagtcccag

SEQ ID NO: 6413 - DNA, 23 bp, Artificial sequence
  Primer
ctggactcatgcatgagtccagg

SEQ ID NO: 6414 - DNA, 23 bp, Artificial sequence
  Primer
cgtgactcatgcatgagtcacgg

SEQ ID NO: 6415 - DNA, 23 bp, Artificial sequence
  Primer
ggcgactcatgcatgagtcgccg

SEQ ID NO: 6416 - DNA, 23 bp, Artificial sequence
  Primer
agcgactcatgcatgagtcgctg

SEQ ID NO: 6417 - DNA, 23 bp, Artificial sequence
  Primer
gacgactcatgcatgagtcgtcg

SEQ ID NO: 6418 - DNA, 23 bp, Artificial sequence
  Primer
ggagactcatgcatgagtctccg

SEQ ID NO: 6419 - DNA, 23 bp, Artificial sequence
  Primer
tgcgactcatgcatgagtcgcag

SEQ ID NO: 6420 - DNA, 23 bp, Artificial sequence
  Primer
ggtgactcatgcatgagtcaccg

SEQ ID NO: 6421 - DNA, 23 bp, Artificial sequence
  Primer
acggactcatgcatgagtccgtg

SEQ ID NO: 6422 - DNA, 23 bp, Artificial sequence
  Primer
ccagactcatgcatgagtctggg

SEQ ID NO: 6423 - DNA, 23 bp, Artificial sequence
  Primer
tcggactcatgcatgagtccgag

SEQ ID NO: 6424 - DNA, 23 bp, Artificial sequence
  Primer
cctgactcatgcatgagtcaggg

SEQ ID NO: 6425 - DNA, 23 bp, Artificial sequence
  Primer
cacgactcatgcatgagtcgtgg

SEQ ID NO: 6426 - DNA, 23 bp, Artificial sequence
  Primer
gccgactcatgcatgagtcggct

SEQ ID NO: 6427 - DNA, 23 bp, Artificial sequence
  Primer
gccgactcatgcatgagtcggca

SEQ ID NO: 6428 - DNA, 23 bp, Artificial sequence
  Primer
cgagactcatgcatgagtctcgc

SEQ ID NO: 6429 - DNA, 23 bp, Artificial sequence
  Primer
cgtgactcatgcatgagtcacgc

SEQ ID NO: 6430 - DNA, 23 bp, Artificial sequence
  Primer
caggactcatgcatgagtcctgc

SEQ ID NO: 6431 - DNA, 23 bp, Artificial sequence
  Primer
ctggactcatgcatgagtccagc

SEQ ID NO: 6432 - DNA, 23 bp, Artificial sequence
  Primer
gaggactcatgcatgagtcctcg

SEQ ID NO: 6433 - DNA, 23 bp, Artificial sequence
  Primer
gtggactcatgcatgagtccacg

SEQ ID NO: 6434 - DNA, 23 bp, Artificial sequence
  Primer
accgactcatgcatgagtcggtg

SEQ ID NO: 6435 - DNA, 23 bp, Artificial sequence
  Primer
tccgactcatgcatgagtcggag

SEQ ID NO: 6436 - DNA, 23 bp, Artificial sequence
  Primer
cgggactcatgcatgagtcccgc

SEQ ID NO: 6437 - DNA, 23 bp, Artificial sequence
  Primer
agggactcatgcatgagtccctc

SEQ ID NO: 6438 - DNA, 23 bp, Artificial sequence
  Primer
tgggactcatgcatgagtcccac

SEQ ID NO: 6439 - DNA, 23 bp, Artificial sequence
  Primer
  misc_feature (1)..(3): n is a, c, g, or t
  misc_feature (20)..(23): n is a, c, g, or t
nnngactcatcgatgagtcnnnn

SEQ ID NO: 6440 - DNA, 23 bp, Artificial sequence
  Primer
gcggactcatcgatgagtccgcc

SEQ ID NO: 6441 - DNA, 23 bp, Artificial sequence
  Primer
gcggactcatcgatgagtccgct

SEQ ID NO: 6442 - DNA, 23 bp, Artificial sequence
  Primer
acggactcatcgatgagtccgtc

SEQ ID NO: 6443 - DNA, 23 bp, Artificial sequence
  Primer
gaggactcatcgatgagtcctcc

SEQ ID NO: 6444 - DNA, 23 bp, Artificial sequence
  Primer
gcagactcatcgatgagtctgcc

SEQ ID NO: 6445 - DNA, 23 bp, Artificial sequence
  Primer
gcggactcatcgatgagtccgca

SEQ ID NO: 6446 - DNA, 23 bp, Artificial sequence
  Primer
tcggactcatcgatgagtccgac

SEQ ID NO: 6447 - DNA, 23 bp, Artificial sequence
  Primer
gtggactcatcgatgagtccacc

SEQ ID NO: 6448 - DNA, 23 bp, Artificial sequence
  Primer
gctgactcatcgatgagtcagcc

SEQ ID NO: 6449 - DNA, 23 bp, Artificial sequence
  Primer
cccgactcatcgatgagtcgggc

SEQ ID NO: 6450 - DNA, 23 bp, Artificial sequence
  Primer
cccgactcatcgatgagtcgggt

SEQ ID NO: 6451 - DNA, 23 bp, Artificial sequence
  Primer
accgactcatcgatgagtcggtc

SEQ ID NO: 6452 - DNA, 23 bp, Artificial sequence
  Primer
cacgactcatcgatgagtcgtgc

SEQ ID NO: 6453 - DNA, 23 bp, Artificial sequence
  Primer
ccagactcatcgatgagtctggc

SEQ ID NO: 6454 - DNA, 23 bp, Artificial sequence
  Primer
cccgactcatcgatgagtcggga

SEQ ID NO: 6455 - DNA, 23 bp, Artificial sequence
  Primer
tccgactcatcgatgagtcggac

SEQ ID NO: 6456 - DNA, 23 bp, Artificial sequence
  Primer
cctgactcatcgatgagtcaggc

SEQ ID NO: 6457 - DNA, 23 bp, Artificial sequence
  Primer
ggcgactcatcgatgagtcgccc

SEQ ID NO: 6458 - DNA, 23 bp, Artificial sequence
  Primer
ggcgactcatcgatgagtcgcct

SEQ ID NO: 6459 - DNA, 23 bp, Artificial sequence
  Primer
agcgactcatcgatgagtcgctc

SEQ ID NO: 6460 - DNA, 23 bp, Artificial sequence
  Primer
gacgactcatcgatgagtcgtcc

SEQ ID NO: 6461 - DNA, 23 bp, Artificial sequence
  Primer
ggagactcatcgatgagtctccc

SEQ ID NO: 6462 - DNA, 23 bp, Artificial sequence
  Primer
ggcgactcatcgatgagtcgcca

SEQ ID NO: 6463 - DNA, 23 bp, Artificial sequence
  Primer
tgcgactcatcgatgagtcgcac

SEQ ID NO: 6464 - DNA, 23 bp, Artificial sequence
  Primer
ggtgactcatcgatgagtcaccc

SEQ ID NO: 6465 - DNA, 23 bp, Artificial sequence
  Primer
cgggactcatcgatgagtcccgt

SEQ ID NO: 6466 - DNA, 23 bp, Artificial sequence
  Primer
agggactcatcgatgagtccctg

SEQ ID NO: 6467 - DNA, 23 bp, Artificial sequence
  Primer
caggactcatcgatgagtcctgg

SEQ ID NO: 6468 - DNA, 23 bp, Artificial sequence
  Primer
cgagactcatcgatgagtctcgg

SEQ ID NO: 6469 - DNA, 23 bp, Artificial sequence
  Primer
cgggactcatcgatgagtcccga

SEQ ID NO: 6470 - DNA, 23 bp, Artificial sequence
  Primer
tgggactcatcgatgagtcccag

SEQ ID NO: 6471 - DNA, 23 bp, Artificial sequence
  Primer
ctggactcatcgatgagtccagg

SEQ ID NO: 6472 - DNA, 23 bp, Artificial sequence
  Primer
cgtgactcatcgatgagtcacgg

SEQ ID NO: 6473 - DNA, 23 bp, Artificial sequence
  Primer
ggcgactcatcgatgagtcgccg

SEQ ID NO: 6474 - DNA, 23 bp, Artificial sequence
  Primer
agcgactcatcgatgagtcgctg

SEQ ID NO: 6475 - DNA, 23 bp, Artificial sequence
  Primer
gacgactcatcgatgagtcgtcg

SEQ ID NO: 6476 - DNA, 23 bp, Artificial sequence
  Primer
ggagactcatcgatgagtctccg

SEQ ID NO: 6477 - DNA, 23 bp, Artificial sequence
  Primer
tgcgactcatcgatgagtcgcag

SEQ ID NO: 6478 - DNA, 23 bp, Artificial sequence
  Primer
ggtgactcatcgatgagtcaccg

SEQ ID NO: 6479 - DNA, 23 bp, Artificial sequence
  Primer
acggactcatcgatgagtccgtg

SEQ ID NO: 6480 - DNA, 23 bp, Artificial sequence
  Primer
ccagactcatcgatgagtctggg

SEQ ID NO: 6481 - DNA, 23 bp, Artificial sequence
  Primer
tcggactcatcgatgagtccgag

SEQ ID NO: 6482 - DNA, 23 bp, Artificial sequence
  Primer
cctgactcatcgatgagtcaggg

SEQ ID NO: 6483 - DNA, 23 bp, Artificial sequence
  Primer
cacgactcatcgatgagtcgtgg

SEQ ID NO: 6484 - DNA, 23 bp, Artificial sequence
  Primer
gccgactcatcgatgagtcggct

SEQ ID NO: 6485 - DNA, 23 bp, Artificial sequence
  Primer
gccgactcatcgatgagtcggca

SEQ ID NO: 6486 - DNA, 23 bp, Artificial sequence
  Primer
cgagactcatcgatgagtctcgc

SEQ ID NO: 6487 - DNA, 23 bp, Artificial sequence
  Primer
cgtgactcatcgatgagtcacgc

SEQ ID NO: 6488 - DNA, 23 bp, Artificial sequence
  Primer
caggactcatcgatgagtcctgc

SEQ ID NO: 6489 - DNA, 23 bp, Artificial sequence
  Primer
ctggactcatcgatgagtccagc

SEQ ID NO: 6490 - DNA, 23 bp, Artificial sequence
  Primer
gaggactcatcgatgagtcctcg

SEQ ID NO: 6491 - DNA, 23 bp, Artificial sequence
  Primer
gtggactcatcgatgagtccacg

SEQ ID NO: 6492 - DNA, 23 bp, Artificial sequence
  Primer
accgactcatcgatgagtcggtg

SEQ ID NO: 6493 - DNA, 23 bp, Artificial sequence
  Primer
tccgactcatcgatgagtcggag

SEQ ID NO: 6494 - DNA, 23 bp, Artificial sequence
  Primer
cgggactcatcgatgagtcccgc

SEQ ID NO: 6495 - DNA, 23 bp, Artificial sequence
  Primer
agggactcatcgatgagtccctc

SEQ ID NO: 6496 - DNA, 23 bp, Artificial sequence
  Primer
tgggactcatcgatgagtcccac

SEQ ID NO: 6497 - DNA, 23 bp, Artificial sequence
  Primer
  misc_feature (1)..(3): n is a, c, g, or t
  misc_feature (20)..(23): n is a, c, g, or t
nnngactcttataagagtcnnnn

SEQ ID NO: 6498 - DNA, 23 bp, Artificial sequence
  Primer
gcggactcttataagagtccgcc

SEQ ID NO: 6499 - DNA, 23 bp, Artificial sequence
  Primer
gcggactcttataagagtccgct

SEQ ID NO: 6500 - DNA, 23 bp, Artificial sequence
  Primer
acggactcttataagagtccgtc

SEQ ID NO: 6501 - DNA, 23 bp, Artificial sequence
  Primer
gaggactcttataagagtcctcc

SEQ ID NO: 6502 - DNA, 23 bp, Artificial sequence
  Primer
gcagactcttataagagtctgcc

SEQ ID NO: 6503 - DNA, 23 bp, Artificial sequence
  Primer
gcggactcttataagagtccgca

SEQ ID NO: 6504 - DNA, 23 bp, Artificial sequence
  Primer
tcggactcttataagagtccgac

SEQ ID NO: 6505 - DNA, 23 bp, Artificial sequence
  Primer
gtggactcttataagagtccacc

SEQ ID NO: 6506 - DNA, 23 bp, Artificial sequence
  Primer
gctgactcttataagagtcagcc

SEQ ID NO: 6507 - DNA, 23 bp, Artificial sequence
  Primer
cccgactcttataagagtcgggc

SEQ ID NO: 6508 - DNA, 23 bp, Artificial sequence
  Primer
cccgactcttataagagtcgggt

SEQ ID NO: 6509 - DNA, 23 bp, Artificial sequence
  Primer
accgactcttataagagtcggtc

SEQ ID NO: 6510 - DNA, 23 bp, Artificial sequence
  Primer
cacgactcttataagagtcgtgc

SEQ ID NO: 6511 - DNA, 23 bp, Artificial sequence
  Primer
ccagactcttataagagtctggc

SEQ ID NO: 6512 - DNA, 23 bp, Artificial sequence
  Primer
cccgactcttataagagtcggga

SEQ ID NO: 6513 - DNA, 23 bp, Artificial sequence
  Primer
tccgactcttataagagtcggac

SEQ ID NO: 6514 - DNA, 23 bp, Artificial sequence
  Primer
cctgactcttataagagtcaggc

SEQ ID NO: 6515 - DNA, 23 bp, Artificial sequence
  Primer
ggcgactcttataagagtcgccc

SEQ ID NO: 6516 - DNA, 23 bp, Artificial sequence
  Primer
ggcgactcttataagagtcgcct

SEQ ID NO: 6517 - DNA, 23 bp, Artificial sequence
  Primer
agcgactcttataagagtcgctc

SEQ ID NO: 6518 - DNA, 23 bp, Artificial sequence
  Primer
gacgactcttataagagtcgtcc

SEQ ID NO: 6519 - DNA, 23 bp, Artificial sequence
  Primer
ggagactcttataagagtctccc

SEQ ID NO: 6520 - DNA, 23 bp, Artificial sequence
  Primer
ggcgactcttataagagtcgcca

SEQ ID NO: 6521 - DNA, 23 bp, Artificial sequence
  Primer
tgcgactcttataagagtcgcac

SEQ ID NO: 6522 - DNA, 23 bp, Artificial sequence
  Primer
ggtgactcttataagagtcaccc

SEQ ID NO: 6523 - DNA, 23 bp, Artificial sequence
  Primer
cgggactcttataagagtcccgt

SEQ ID NO: 6524 - DNA, 23 bp, Artificial sequence
  Primer
agggactcttataagagtccctg

SEQ ID NO: 6525 - DNA, 23 bp, Artificial sequence
  Primer
caggactcttataagagtcctgg

SEQ ID NO: 6526 - DNA, 23 bp, Artificial sequence
  Primer
cgagactcttataagagtctcgg

SEQ ID NO: 6527 - DNA, 23 bp, Artificial sequence
  Primer
cgggactcttataagagtcccga

SEQ ID NO: 6528 - DNA, 23 bp, Artificial sequence
  Primer
tgggactcttataagagtcccag

SEQ ID NO: 6529 - DNA, 23 bp, Artificial sequence
  Primer
ctggactcttataagagtccagg

SEQ ID NO: 6530 - DNA, 23 bp, Artificial sequence
  Primer
cgtgactcttataagagtcacgg

SEQ ID NO: 6531 - DNA, 23 bp, Artificial sequence
  Primer
ggcgactcttataagagtcgccg

SEQ ID NO: 6532 - DNA, 23 bp, Artificial sequence
  Primer
agcgactcttataagagtcgctg

SEQ ID NO: 6533 - DNA, 23 bp, Artificial sequence
  Primer
gacgactcttataagagtcgtcg

SEQ ID NO: 6534 - DNA, 23 bp, Artificial sequence
  Primer
ggagactcttataagagtctccg

SEQ ID NO: 6535 - DNA, 23 bp, Artificial sequence
  Primer
tgcgactcttataagagtcgcag

SEQ ID NO: 6536 - DNA, 23 bp, Artificial sequence
  Primer
ggtgactcttataagagtcaccg

SEQ ID NO: 6537 - DNA, 23 bp, Artificial sequence
  Primer
acggactcttataagagtccgtg

SEQ ID NO: 6538 - DNA, 23 bp, Artificial sequence
  Primer
ccagactcttataagagtctggg

SEQ ID NO: 6539 - DNA, 23 bp, Artificial sequence
  Primer
tcggactcttataagagtccgag

SEQ ID NO: 6540 - DNA, 23 bp, Artificial sequence
  Primer
cctgactcttataagagtcaggg

SEQ ID NO: 6541 - DNA, 23 bp, Artificial sequence
  Primer
cacgactcttataagagtcgtgg

SEQ ID NO: 6542 - DNA, 23 bp, Artificial sequence
  Primer
gccgactcttataagagtcggct

SEQ ID NO: 6543 - DNA, 23 bp, Artificial sequence
  Primer
gccgactcttataagagtcggca

SEQ ID NO: 6544 - DNA, 23 bp, Artificial sequence
  Primer
cgagactcttataagagtctcgc

SEQ ID NO: 6545 - DNA, 23 bp, Artificial sequence
  Primer
cgtgactcttataagagtcacgc

SEQ ID NO: 6546 - DNA, 23 bp, Artificial sequence
  Primer
caggactcttataagagtcctgc

SEQ ID NO: 6547 - DNA, 23 bp, Artificial sequence
  Primer
ctggactcttataagagtccagc

SEQ ID NO: 6548 - DNA, 23 bp, Artificial sequence
  Primer
gaggactcttataagagtcctcg

SEQ ID NO: 6549 - DNA, 23 bp, Artificial sequence
  Primer
gtggactcttataagagtccacg

SEQ ID NO: 6550 - DNA, 23 bp, Artificial sequence
  Primer
accgactcttataagagtcggtg

SEQ ID NO: 6551 - DNA, 23 bp, Artificial sequence
  Primer
tccgactcttataagagtcggag

SEQ ID NO: 6552 - DNA, 23 bp, Artificial sequence
  Primer
cgggactcttataagagtcccgc

SEQ ID NO: 6553 - DNA, 23 bp, Artificial sequence
  Primer
agggactcttataagagtccctc

SEQ ID NO: 6554 - DNA, 23 bp, Artificial sequence
  Primer
tgggactcttataagagtcccac

SEQ ID NO: 6555 - DNA, 23 bp, Artificial sequence
  Primer
  misc_feature (1)..(3): n is a, c, g, or t
  misc_feature (20)..(23): n is a, c, g, or t
nnngactctttaaagagtcnnnn

SEQ ID NO: 6556 - DNA, 23 bp, Artificial sequence
  Primer
gcggactctttaaagagtccgcc

SEQ ID NO: 6557 - DNA, 23 bp, Artificial sequence
  Primer
gcggactctttaaagagtccgct

SEQ ID NO: 6558 - DNA, 23 bp, Artificial sequence
  Primer
acggactctttaaagagtccgtc

SEQ ID NO: 6559 - DNA, 23 bp, Artificial sequence
  Primer
gaggactctttaaagagtcctcc

SEQ ID NO: 6560 - DNA, 23 bp, Artificial sequence
  Primer
gcagactctttaaagagtctgcc

SEQ ID NO: 6561 - DNA, 23 bp, Artificial sequence
  Primer
gcggactctttaaagagtccgca

SEQ ID NO: 6562 - DNA, 23 bp, Artificial sequence
  Primer
tcggactctttaaagagtccgac

SEQ ID NO: 6563 - DNA, 23 bp, Artificial sequence
  Primer
gtggactctttaaagagtccacc

SEQ ID NO: 6564 - DNA, 23 bp, Artificial sequence
  Primer
gctgactctttaaagagtcagcc

SEQ ID NO: 6565 - DNA, 23 bp, Artificial sequence
  Primer
cccgactctttaaagagtcgggc

SEQ ID NO: 6566 - DNA, 23 bp, Artificial sequence
  Primer
cccgactctttaaagagtcgggt

SEQ ID NO: 6567 - DNA, 23 bp, Artificial sequence
  Primer
accgactctttaaagagtcggtc

SEQ ID NO: 6568 - DNA, 23 bp, Artificial sequence
  Primer
cacgactctttaaagagtcgtgc

SEQ ID NO: 6569 - DNA, 23 bp, Artificial sequence
  Primer
ccagactctttaaagagtctggc

SEQ ID NO: 6570 - DNA, 23 bp, Artificial sequence
  Primer
cccgactctttaaagagtcggga

SEQ ID NO: 6571 - DNA, 23 bp, Artificial sequence
  Primer
tccgactctttaaagagtcggac

SEQ ID NO: 6572 - DNA, 23 bp, Artificial sequence
  Primer
cctgactctttaaagagtcaggc

SEQ ID NO: 6573 - DNA, 23 bp, Artificial sequence
  Primer
ggcgactctttaaagagtcgccc

SEQ ID NO: 6574 - DNA, 23 bp, Artificial sequence
  Primer
ggcgactctttaaagagtcgcct

SEQ ID NO: 6575 - DNA, 23 bp, Artificial sequence
  Primer
agcgactctttaaagagtcgctc

SEQ ID NO: 6576 - DNA, 23 bp, Artificial sequence
  Primer
gacgactctttaaagagtcgtcc

SEQ ID NO: 6577 - DNA, 23 bp, Artificial sequence
  Primer
ggagactctttaaagagtctccc

SEQ ID NO: 6578 - DNA, 23 bp, Artificial sequence
  Primer
ggcgactctttaaagagtcgcca

SEQ ID NO: 6579 - DNA, 23 bp, Artificial sequence
  Primer
tgcgactctttaaagagtcgcac

SEQ ID NO: 6580 - DNA, 23 bp, Artificial sequence
  Primer
ggtgactctttaaagagtcaccc

SEQ ID NO: 6581 - DNA, 23 bp, Artificial sequence
  Primer
cgggactctttaaagagtcccgt

SEQ ID NO: 6582 - DNA, 23 bp, Artificial sequence
  Primer
agggactctttaaagagtccctg

SEQ ID NO: 6583 - DNA, 23 bp, Artificial sequence
  Primer
caggactctttaaagagtcctgg

SEQ ID NO: 6584 - DNA, 23 bp, Artificial sequence
  Primer
cgagactctttaaagagtctcgg

SEQ ID NO: 6585 - DNA, 23 bp, Artificial sequence
  Primer
cgggactctttaaagagtcccga

SEQ ID NO: 6586 - DNA, 23 bp, Artificial sequence
  Primer
tgggactctttaaagagtcccag

SEQ ID NO: 6587 - DNA, 23 bp, Artificial sequence
  Primer
ctggactctttaaagagtccagg

SEQ ID NO: 6588 - DNA, 23 bp, Artificial sequence
  Primer
cgtgactctttaaagagtcacgg

SEQ ID NO: 6589 - DNA, 23 bp, Artificial sequence
  Primer
ggcgactctttaaagagtcgccg

SEQ ID NO: 6590 - DNA, 23 bp, Artificial sequence
  Primer
agcgactctttaaagagtcgctg

SEQ ID NO: 6591 - DNA, 23 bp, Artificial sequence
  Primer
gacgactctttaaagagtcgtcg

SEQ ID NO: 6592 - DNA, 23 bp, Artificial sequence
  Primer
ggagactctttaaagagtctccg

SEQ ID NO: 6593 - DNA, 23 bp, Artificial sequence
  Primer
tgcgactctttaaagagtcgcag

SEQ ID NO: 6594 - DNA, 23 bp, Artificial sequence
  Primer
ggtgactctttaaagagtcaccg

SEQ ID NO: 6595 - DNA, 23 bp, Artificial sequence
  Primer
acggactctttaaagagtccgtg

SEQ ID NO: 6596 - DNA, 23 bp, Artificial sequence
  Primer
ccagactctttaaagagtctggg

SEQ ID NO: 6597 - DNA, 23 bp, Artificial sequence
  Primer
tcggactctttaaagagtccgag

SEQ ID NO: 6598 - DNA, 23 bp, Artificial sequence
  Primer
cctgactctttaaagagtcaggg

SEQ ID NO: 6599 - DNA, 23 bp, Artificial sequence
  Primer
cacgactctttaaagagtcgtgg

SEQ ID NO: 6600 - DNA, 23 bp, Artificial sequence
  Primer
gccgactctttaaagagtcggct

SEQ ID NO: 6601 - DNA, 23 bp, Artificial sequence
  Primer
gccgactctttaaagagtcggca

SEQ ID NO: 6602 - DNA, 23 bp, Artificial sequence
  Primer
cgagactctttaaagagtctcgc

SEQ ID NO: 6603 - DNA, 23 bp, Artificial sequence
  Primer
cgtgactctttaaagagtcacgc

SEQ ID NO: 6604 - DNA, 23 bp, Artificial sequence
  Primer
caggactctttaaagagtcctgc

SEQ ID NO: 6605 - DNA, 23 bp, Artificial sequence
  Primer
ctggactctttaaagagtccagc

SEQ ID NO: 6606 - DNA, 23 bp, Artificial sequence
  Primer
gaggactctttaaagagtcctcg

SEQ ID NO: 6607 - DNA, 23 bp, Artificial sequence
  Primer
gtggactctttaaagagtccacg

SEQ ID NO: 6608 - DNA, 23 bp, Artificial sequence
  Primer
accgactctttaaagagtcggtg

SEQ ID NO: 6609 - DNA, 23 bp, Artificial sequence
  Primer
tccgactctttaaagagtcggag

SEQ ID NO: 6610 - DNA, 23 bp, Artificial sequence
  Primer
cgggactctttaaagagtcccgc

SEQ ID NO: 6611 - DNA, 23 bp, Artificial sequence
  Primer
agggactctttaaagagtccctc

SEQ ID NO: 6612 - DNA, 23 bp, Artificial sequence
  Primer
tgggactctttaaagagtcccac

SEQ ID NO: 6613 - DNA, 23 bp, Artificial sequence
  Primer
  misc_feature (1)..(3): n is a, c, g, or t
  misc_feature (20)..(23): n is a, c, g, or t
nnngactcttgcaagagtcnnnn

SEQ ID NO: 6614 - DNA, 23 bp, Artificial sequence
  Primer
gcggactcttgcaagagtccgcc

SEQ ID NO: 6615 - DNA, 23 bp, Artificial sequence
  Primer
gcggactcttgcaagagtccgct

SEQ ID NO: 6616 - DNA, 23 bp, Artificial sequence
  Primer
acggactcttgcaagagtccgtc

SEQ ID NO: 6617 - DNA, 23 bp, Artificial sequence
  Primer
gaggactcttgcaagagtcctcc

SEQ ID NO: 6618 - DNA, 23 bp, Artificial sequence
  Primer
gcagactcttgcaagagtctgcc

SEQ ID NO: 6619 - DNA, 23 bp, Artificial sequence
  Primer
gcggactcttgcaagagtccgca

SEQ ID NO: 6620 - DNA, 23 bp, Artificial sequence
  Primer
tcggactcttgcaagagtccgac

SEQ ID NO: 6621 - DNA, 23 bp, Artificial sequence
  Primer
gtggactcttgcaagagtccacc

SEQ ID NO: 6622 - DNA, 23 bp, Artificial sequence
  Primer
gctgactcttgcaagagtcagcc

SEQ ID NO: 6623 - DNA, 23 bp, Artificial sequence
  Primer
cccgactcttgcaagagtcgggc

SEQ ID NO: 6624 - DNA, 23 bp, Artificial sequence
  Primer
cccgactcttgcaagagtcgggt

SEQ ID NO: 6625 - DNA, 23 bp, Artificial sequence
  Primer
accgactcttgcaagagtcggtc

SEQ ID NO: 6626 - DNA, 23 bp, Artificial sequence
  Primer
cacgactcttgcaagagtcgtgc

SEQ ID NO: 6627 - DNA, 23 bp, Artificial sequence
  Primer
ccagactcttgcaagagtctggc

SEQ ID NO: 6628 - DNA, 23 bp, Artificial sequence
  Primer
cccgactcttgcaagagtcggga

SEQ ID NO: 6629 - DNA, 23 bp, Artificial sequence
  Primer
tccgactcttgcaagagtcggac

SEQ ID NO: 6630 - DNA, 23 bp, Artificial sequence
  Primer
cctgactcttgcaagagtcaggc

SEQ ID NO: 6631 - DNA, 23 bp, Artificial sequence
  Primer
ggcgactcttgcaagagtcgccc

SEQ ID NO: 6632 - DNA, 23 bp, Artificial sequence
  Primer
ggcgactcttgcaagagtcgcct

SEQ ID NO: 6633 - DNA, 23 bp, Artificial sequence
  Primer
agcgactcttgcaagagtcgctc

SEQ ID NO: 6634 - DNA, 23 bp, Artificial sequence
  Primer
gacgactcttgcaagagtcgtcc

SEQ ID NO: 6635 - DNA, 23 bp, Artificial sequence
  Primer
ggagactcttgcaagagtctccc

SEQ ID NO: 6636 - DNA, 23 bp, Artificial sequence
  Primer
ggcgactcttgcaagagtcgcca

SEQ ID NO: 6637 - DNA, 23 bp, Artificial sequence
  Primer
tgcgactcttgcaagagtcgcac

SEQ ID NO: 6638 - DNA, 23 bp, Artificial sequence
  Primer
ggtgactcttgcaagagtcaccc

SEQ ID NO: 6639 - DNA, 23 bp, Artificial sequence
  Primer
cgggactcttgcaagagtcccgt

SEQ ID NO: 6640 - DNA, 23 bp, Artificial sequence
  Primer
agggactcttgcaagagtccctg

SEQ ID NO: 6641 - DNA, 23 bp, Artificial sequence
  Primer
caggactcttgcaagagtcctgg

SEQ ID NO: 6642 - DNA, 23 bp, Artificial sequence
  Primer
cgagactcttgcaagagtctcgg

SEQ ID NO: 6643 - DNA, 23 bp, Artificial sequence
  Primer
cgggactcttgcaagagtcccga

SEQ ID NO: 6644 - DNA, 23 bp, Artificial sequence
  Primer
tgggactcttgcaagagtcccag

SEQ ID NO: 6645 - DNA, 23 bp, Artificial sequence
  Primer
ctggactcttgcaagagtccagg

SEQ ID NO: 6646 - DNA, 23 bp, Artificial sequence
  Primer
cgtgactcttgcaagagtcacgg

SEQ ID NO: 6647 - DNA, 23 bp, Artificial sequence
  Primer
ggcgactcttgcaagagtcgccg

SEQ ID NO: 6648 - DNA, 23 bp, Artificial sequence
  Primer
agcgactcttgcaagagtcgctg

SEQ ID NO: 6649 - DNA, 23 bp, Artificial sequence
  Primer
gacgactcttgcaagagtcgtcg

SEQ ID NO: 6650 - DNA, 23 bp, Artificial sequence
  Primer
ggagactcttgcaagagtctccg

SEQ ID NO: 6651 - DNA, 23 bp, Artificial sequence
  Primer
tgcgactcttgcaagagtcgcag

SEQ ID NO: 6652 - DNA, 23 bp, Artificial sequence
  Primer
ggtgactcttgcaagagtcaccg

SEQ ID NO: 6653 - DNA, 23 bp, Artificial sequence
  Primer
acggactcttgcaagagtccgtg

SEQ ID NO: 6654 - DNA, 23 bp, Artificial sequence
  Primer
ccagactcttgcaagagtctggg

SEQ ID NO: 6655 - DNA, 23 bp, Artificial sequence
  Primer
tcggactcttgcaagagtccgag

SEQ ID NO: 6656 - DNA, 23 bp, Artificial sequence
  Primer
cctgactcttgcaagagtcaggg

SEQ ID NO: 6657 - DNA, 23 bp, Artificial sequence
  Primer
cacgactcttgcaagagtcgtgg

SEQ ID NO: 6658 - DNA, 23 bp, Artificial sequence
  Primer
gccgactcttgcaagagtcggct

SEQ ID NO: 6659 - DNA, 23 bp, Artificial sequence
  Primer
gccgactcttgcaagagtcggca

SEQ ID NO: 6660 - DNA, 23 bp, Artificial sequence
  Primer
cgagactcttgcaagagtctcgc

SEQ ID NO: 6661 - DNA, 23 bp, Artificial sequence
  Primer
cgtgactcttgcaagagtcacgc

SEQ ID NO: 6662 - DNA, 23 bp, Artificial sequence
  Primer
caggactcttgcaagagtcctgc

SEQ ID NO: 6663 - DNA, 23 bp, Artificial sequence
  Primer
ctggactcttgcaagagtccagc

SEQ ID NO: 6664 - DNA, 23 bp, Artificial sequence
  Primer
gaggactcttgcaagagtcctcg

SEQ ID NO: 6665 - DNA, 23 bp, Artificial sequence
  Primer
gtggactcttgcaagagtccacg

SEQ ID NO: 6666 - DNA, 23 bp, Artificial sequence
  Primer
accgactcttgcaagagtcggtg

SEQ ID NO: 6667 - DNA, 23 bp, Artificial sequence
  Primer
tccgactcttgcaagagtcggag

SEQ ID NO: 6668 - DNA, 23 bp, Artificial sequence
  Primer
cgggactcttgcaagagtcccgc

SEQ ID NO: 6669 - DNA, 23 bp, Artificial sequence
  Primer
agggactcttgcaagagtccctc

SEQ ID NO: 6670 - DNA, 23 bp, Artificial sequence
  Primer
tgggactcttgcaagagtcccac

SEQ ID NO: 6671 - DNA, 23 bp, Artificial sequence
  Primer
  misc_feature (1)..(3): n is a, c, g, or t
  misc_feature (20)..(23): n is a, c, g, or t
nnngactcttcgaagagtcnnnn

SEQ ID NO: 6672 - DNA, 23 bp, Artificial sequence
  Primer
gcggactcttcgaagagtccgcc

SEQ ID NO: 6673 - DNA, 23 bp, Artificial sequence
  Primer
gcggactcttcgaagagtccgct

SEQ ID NO: 6674 - DNA, 23 bp, Artificial sequence
  Primer
acggactcttcgaagagtccgtc

SEQ ID NO: 6675 - DNA, 23 bp, Artificial sequence
  Primer
gaggactcttcgaagagtcctcc

SEQ ID NO: 6676 - DNA, 23 bp, Artificial sequence
  Primer
gcagactcttcgaagagtctgcc

SEQ ID NO: 6677 - DNA, 23 bp, Artificial sequence
  Primer
gcggactcttcgaagagtccgca

SEQ ID NO: 6678 - DNA, 23 bp, Artificial sequence
  Primer
tcggactcttcgaagagtccgac

SEQ ID NO: 6679 - DNA, 23 bp, Artificial sequence
  Primer
gtggactcttcgaagagtccacc

SEQ ID NO: 6680 - DNA, 23 bp, Artificial sequence
  Primer
gctgactcttcgaagagtcagcc

SEQ ID NO: 6681 - DNA, 23 bp, Artificial sequence
  Primer
cccgactcttcgaagagtcgggc

SEQ ID NO: 6682 - DNA, 23 bp, Artificial sequence
  Primer
cccgactcttcgaagagtcgggt

SEQ ID NO: 6683 - DNA, 23 bp, Artificial sequence
  Primer
accgactcttcgaagagtcggtc

SEQ ID NO: 6684 - DNA, 23 bp, Artificial sequence
  Primer
cacgactcttcgaagagtcgtgc

SEQ ID NO: 6685 - DNA, 23 bp, Artificial sequence
  Primer
ccagactcttcgaagagtctggc

SEQ ID NO: 6686 - DNA, 23 bp, Artificial sequence
  Primer
cccgactcttcgaagagtcggga

SEQ ID NO: 6687 - DNA, 23 bp, Artificial sequence
  Primer
tccgactcttcgaagagtcggac

SEQ ID NO: 6688 - DNA, 23 bp, Artificial sequence
  Primer
cctgactcttcgaagagtcaggc

SEQ ID NO: 6689 - DNA, 23 bp, Artificial sequence
  Primer
ggcgactcttcgaagagtcgccc

SEQ ID NO: 6690 - DNA, 23 bp, Artificial sequence
  Primer
ggcgactcttcgaagagtcgcct

SEQ ID NO: 6691 - DNA, 23 bp, Artificial sequence
  Primer
agcgactcttcgaagagtcgctc

SEQ ID NO: 6692 - DNA, 23 bp, Artificial sequence
  Primer
gacgactcttcgaagagtcgtcc

SEQ ID NO: 6693 - DNA, 23 bp, Artificial sequence
  Primer
ggagactcttcgaagagtctccc

SEQ ID NO: 6694 - DNA, 23 bp, Artificial sequence
  Primer
ggcgactcttcgaagagtcgcca

SEQ ID NO: 6695 - DNA, 23 bp, Artificial sequence
  Primer
tgcgactcttcgaagagtcgcac

SEQ ID NO: 6696 - DNA, 23 bp, Artificial sequence
  Primer
ggtgactcttcgaagagtcaccc

SEQ ID NO: 6697 - DNA, 23 bp, Artificial sequence
  Primer
cgggactcttcgaagagtcccgt

SEQ ID NO: 6698 - DNA, 23 bp, Artificial sequence
  Primer
agggactcttcgaagagtccctg

SEQ ID NO: 6699 - DNA, 23 bp, Artificial sequence
  Primer
caggactcttcgaagagtcctgg

SEQ ID NO: 6700 - DNA, 23 bp, Artificial sequence
  Primer
cgagactcttcgaagagtctcgg

SEQ ID NO: 6701 - DNA, 23 bp, Artificial sequence
  Primer
cgggactcttcgaagagtcccga

SEQ ID NO: 6702 - DNA, 23 bp, Artificial sequence
  Primer
tgggactcttcgaagagtcccag

SEQ ID NO: 6703 - DNA, 23 bp, Artificial sequence
  Primer
ctggactcttcgaagagtccagg

SEQ ID NO: 6704 - DNA, 23 bp, Artificial sequence
  Primer
cgtgactcttcgaagagtcacgg

SEQ ID NO: 6705 - DNA, 23 bp, Artificial sequence
  Primer
ggcgactcttcgaagagtcgccg

SEQ ID NO: 6706 - DNA, 23 bp, Artificial sequence
  Primer
agcgactcttcgaagagtcgctg

SEQ ID NO: 6707 - DNA, 23 bp, Artificial sequence
  Primer
gacgactcttcgaagagtcgtcg

SEQ ID NO: 6708 - DNA, 23 bp, Artificial sequence
  Primer
ggagactcttcgaagagtctccg

SEQ ID NO: 6709 - DNA, 23 bp, Artificial sequence
  Primer
tgcgactcttcgaagagtcgcag

SEQ ID NO: 6710 - DNA, 23 bp, Artificial sequence
  Primer
ggtgactcttcgaagagtcaccg

SEQ ID NO: 6711 - DNA, 23 bp, Artificial sequence
  Primer
acggactcttcgaagagtccgtg

SEQ ID NO: 6712 - DNA, 23 bp, Artificial sequence
  Primer
ccagactcttcgaagagtctggg

SEQ ID NO: 6713 - DNA, 23 bp, Artificial sequence
  Primer
tcggactcttcgaagagtccgag

SEQ ID NO: 6714 - DNA, 23 bp, Artificial sequence
  Primer
cctgactcttcgaagagtcaggg

SEQ ID NO: 6715 - DNA, 23 bp, Artificial sequence
  Primer
cacgactcttcgaagagtcgtgg

SEQ ID NO: 6716 - DNA, 23 bp, Artificial sequence
  Primer
gccgactcttcgaagagtcggct

SEQ ID NO: 6717 - DNA, 23 bp, Artificial sequence
  Primer
gccgactcttcgaagagtcggca

SEQ ID NO: 6718 - DNA, 23 bp, Artificial sequence
  Primer
cgagactcttcgaagagtctcgc

SEQ ID NO: 6719 - DNA, 23 bp, Artificial sequence
  Primer
cgtgactcttcgaagagtcacgc

SEQ ID NO: 6720 - DNA, 23 bp, Artificial sequence
  Primer
caggactcttcgaagagtcctgc

SEQ ID NO: 6721 - DNA, 23 bp, Artificial sequence
  Primer
ctggactcttcgaagagtccagc

SEQ ID NO: 6722 - DNA, 23 bp, Artificial sequence
  Primer
gaggactcttcgaagagtcctcg

SEQ ID NO: 6723 - DNA, 23 bp, Artificial sequence
  Primer
gtggactcttcgaagagtccacg

SEQ ID NO: 6724 - DNA, 23 bp, Artificial sequence
  Primer
accgactcttcgaagagtcggtg

SEQ ID NO: 6725 - DNA, 23 bp, Artificial sequence
  Primer
tccgactcttcgaagagtcggag

SEQ ID NO: 6726 - DNA, 23 bp, Artificial sequence
  Primer
cgggactcttcgaagagtcccgc

SEQ ID NO: 6727 - DNA, 23 bp, Artificial sequence
  Primer
agggactcttcgaagagtccctc

SEQ ID NO: 6728 - DNA, 23 bp, Artificial sequence
  Primer
tgggactcttcgaagagtcccac

SEQ ID NO: 6729 - DNA, 22 bp, Artificial sequence
  Primer
  misc_feature (1)..(2): n is a, c, g, or t
  misc_feature (19)..(22): n is a, c, g, or t
nngactccgatcggagtcnnnn

SEQ ID NO: 6730 - DNA, 22 bp, Artificial sequence
  Primer
cggactccgatcggagtccgcc

SEQ ID NO: 6731 - DNA, 22 bp, Artificial sequence
  Primer
cggactccgatcggagtccgct

SEQ ID NO: 6732 - DNA, 22 bp, Artificial sequence
  Primer
cggactccgatcggagtccgtc

SEQ ID NO: 6733 - DNA, 22 bp, Artificial sequence
  Primer
aggactccgatcggagtcctcc

SEQ ID NO: 6734 - DNA, 22 bp, Artificial sequence
  Primer
cagactccgatcggagtctgcc

SEQ ID NO: 6735 - DNA, 22 bp, Artificial sequence
  Primer
cggactccgatcggagtccgca

SEQ ID NO: 6736 - DNA, 22 bp, Artificial sequence
  Primer
cggactccgatcggagtccgac

SEQ ID NO: 6737 - DNA, 22 bp, Artificial sequence
  Primer
tggactccgatcggagtccacc

SEQ ID NO: 6738 - DNA, 22 bp, Artificial sequence
  Primer
ctgactccgatcggagtcagcc

SEQ ID NO: 6739 - DNA, 22 bp, Artificial sequence
  Primer
ccgactccgatcggagtcgggc

SEQ ID NO: 6740 - DNA, 22 bp, Artificial sequence
  Primer
ccgactccgatcggagtcgggt

SEQ ID NO: 6741 - DNA, 22 bp, Artificial sequence
  Primer
ccgactccgatcggagtcggtc

SEQ ID NO: 6742 - DNA, 22 bp, Artificial sequence
  Primer
acgactccgatcggagtcgtgc

SEQ ID NO: 6743 - DNA, 22 bp, Artificial sequence
  Primer
cagactccgatcggagtctggc

SEQ ID NO: 6744 - DNA, 22 bp, Artificial sequence
  Primer
ccgactccgatcggagtcggga

SEQ ID NO: 6745 - DNA, 22 bp, Artificial sequence
  Primer
ccgactccgatcggagtcggac

SEQ ID NO: 6746 - DNA, 22 bp, Artificial sequence
  Primer
ctgactccgatcggagtcaggc

SEQ ID NO: 6747 - DNA, 22 bp, Artificial sequence
  Primer
gcgactccgatcggagtcgccc

SEQ ID NO: 6748 - DNA, 22 bp, Artificial sequence
  Primer
gcgactccgatcggagtcgcct

SEQ ID NO: 6749 - DNA, 22 bp, Artificial sequence
  Primer
gcgactccgatcggagtcgctc

SEQ ID NO: 6750 - DNA, 22 bp, Artificial sequence
  Primer
acgactccgatcggagtcgtcc

SEQ ID NO: 6751 - DNA, 22 bp, Artificial sequence
  Primer
gagactccgatcggagtctccc

SEQ ID NO: 6752 - DNA, 22 bp, Artificial sequence
  Primer
gcgactccgatcggagtcgcca

SEQ ID NO: 6753 - DNA, 22 bp, Artificial sequence
  Primer
gcgactccgatcggagtcgcac

SEQ ID NO: 6754 - DNA, 22 bp, Artificial sequence
  Primer
gtgactccgatcggagtcaccc

SEQ ID NO: 6755 - DNA, 22 bp, Artificial sequence
  Primer
gggactccgatcggagtcccgt

SEQ ID NO: 6756 - DNA, 22 bp, Artificial sequence
  Primer
gggactccgatcggagtccctg

SEQ ID NO: 6757 - DNA, 22 bp, Artificial sequence
  Primer
aggactccgatcggagtcctgg

SEQ ID NO: 6758 - DNA, 22 bp, Artificial sequence
  Primer
gagactccgatcggagtctcgg

SEQ ID NO: 6759 - DNA, 22 bp, Artificial sequence
  Primer
gggactccgatcggagtcccga

SEQ ID NO: 6760 - DNA, 22 bp, Artificial sequence
  Primer
gggactccgatcggagtcccag

SEQ ID NO: 6761 - DNA, 22 bp, Artificial sequence
  Primer
tggactccgatcggagtccagg

SEQ ID NO: 6762 - DNA, 22 bp, Artificial sequence
  Primer
gtgactccgatcggagtcacgg

SEQ ID NO: 6763 - DNA, 22 bp, Artificial sequence
  Primer
gcgactccgatcggagtcgccg

SEQ ID NO: 6764 - DNA, 22 bp, Artificial sequence
  Primer
gcgactccgatcggagtcgctg

SEQ ID NO: 6765 - DNA, 22 bp, Artificial sequence
  Primer
acgactccgatcggagtcgtcg

SEQ ID NO: 6766 - DNA, 22 bp, Artificial sequence
  Primer
gagactccgatcggagtctccg

SEQ ID NO: 6767 - DNA, 22 bp, Artificial sequence
  Primer
gcgactccgatcggagtcgcag

SEQ ID NO: 6768 - DNA, 22 bp, Artificial sequence
  Primer
gtgactccgatcggagtcaccg

SEQ ID NO: 6769 - DNA, 22 bp, Artificial sequence
  Primer
cggactccgatcggagtccgtg

SEQ ID NO: 6770 - DNA, 22 bp, Artificial sequence
  Primer
cagactccgatcggagtctggg

SEQ ID NO: 6771 - DNA, 22 bp, Artificial sequence
  Primer
cggactccgatcggagtccgag

SEQ ID NO: 6772 - DNA, 22 bp, Artificial sequence
  Primer
ctgactccgatcggagtcaggg

SEQ ID NO: 6773 - DNA, 22 bp, Artificial sequence
  Primer
acgactccgatcggagtcgtgg

SEQ ID NO: 6774 - DNA, 22 bp, Artificial sequence
  Primer
ccgactccgatcggagtcggct

SEQ ID NO: 6775 - DNA, 22 bp, Artificial sequence
  Primer
ccgactccgatcggagtcggca

SEQ ID NO: 6776 - DNA, 22 bp, Artificial sequence
  Primer
gagactccgatcggagtctcgc

SEQ ID NO: 6777 - DNA, 22 bp, Artificial sequence
  Primer
gtgactccgatcggagtcacgc

SEQ ID NO: 6778 - DNA, 22 bp, Artificial sequence
  Primer
aggactccgatcggagtcctgc

SEQ ID NO: 6779 - DNA, 22 bp, Artificial sequence
  Primer
tggactccgatcggagtccagc

SEQ ID NO: 6780 - DNA, 22 bp, Artificial sequence
  Primer
aggactccgatcggagtcctcg

SEQ ID NO: 6781 - DNA, 22 bp, Artificial sequence
  Primer
tggactccgatcggagtccacg

SEQ ID NO: 6782 - DNA, 22 bp, Artificial sequence
  Primer
ccgactccgatcggagtcggtg

SEQ ID NO: 6783 - DNA, 22 bp, Artificial sequence
  Primer
ccgactccgatcggagtcggag

SEQ ID NO: 6784 - DNA, 22 bp, Artificial sequence
  Primer
gggactccgatcggagtcccgc

SEQ ID NO: 6785 - DNA, 22 bp, Artificial sequence
  Primer
gggactccgatcggagtccctc

SEQ ID NO: 6786 - DNA, 22 bp, Artificial sequence
  Primer
gggactccgatcggagtcccac

SEQ ID NO: 6787 - DNA, 22 bp, Artificial sequence
  Primer
  misc_feature (1)..(2): n is a, c, g, or t
  misc_feature (19)..(22): n is a, c, g, or t
nngactccgtacggagtcnnnn

SEQ ID NO: 6788 - DNA, 22 bp, Artificial sequence
  Primer
cggactccgtacggagtccgcc

SEQ ID NO: 6789 - DNA, 22 bp, Artificial sequence
  Primer
cggactccgtacggagtccgct

SEQ ID NO: 6790 - DNA, 22 bp, Artificial sequence
  Primer
cggactccgtacggagtccgtc

SEQ ID NO: 6791 - DNA, 22 bp, Artificial sequence
  Primer
aggactccgtacggagtcctcc

SEQ ID NO: 6792 - DNA, 22 bp, Artificial sequence
  Primer
cagactccgtacggagtctgcc

SEQ ID NO: 6793 - DNA, 22 bp, Artificial sequence
  Primer
cggactccgtacggagtccgca

SEQ ID NO: 6794 - DNA, 22 bp, Artificial sequence
  Primer
cggactccgtacggagtccgac

SEQ ID NO: 6795 - DNA, 22 bp, Artificial sequence
  Primer
tggactccgtacggagtccacc

SEQ ID NO: 6796 - DNA, 22 bp, Artificial sequence
  Primer
ctgactccgtacggagtcagcc

SEQ ID NO: 6797 - DNA, 22 bp, Artificial sequence
  Primer
ccgactccgtacggagtcgggc

SEQ ID NO: 6798 - DNA, 22 bp, Artificial sequence
  Primer
ccgactccgtacggagtcgggt

SEQ ID NO: 6799 - DNA, 22 bp, Artificial sequence
  Primer
ccgactccgtacggagtcggtc

SEQ ID NO: 6800 - DNA, 22 bp, Artificial sequence
  Primer
acgactccgtacggagtcgtgc

SEQ ID NO: 6801 - DNA, 22 bp, Artificial sequence
  Primer
cagactccgtacggagtctggc

SEQ ID NO: 6802 - DNA, 22 bp, Artificial sequence
  Primer
ccgactccgtacggagtcggga

SEQ ID NO: 6803 - DNA, 22 bp, Artificial sequence
  Primer
ccgactccgtacggagtcggac

SEQ ID NO: 6804 - DNA, 22 bp, Artificial sequence
  Primer
ctgactccgtacggagtcaggc

SEQ ID NO: 6805 - DNA, 22 bp, Artificial sequence
  Primer
gcgactccgtacggagtcgccc

SEQ ID NO: 6806 - DNA, 22 bp, Artificial sequence
  Primer
gcgactccgtacggagtcgcct

SEQ ID NO: 6807 - DNA, 22 bp, Artificial sequence
  Primer
gcgactccgtacggagtcgctc

SEQ ID NO: 6808 - DNA, 22 bp, Artificial sequence
  Primer
acgactccgtacggagtcgtcc

SEQ ID NO: 6809 - DNA, 22 bp, Artificial sequence
  Primer
gagactccgtacggagtctccc

SEQ ID NO: 6810 - DNA, 22 bp, Artificial sequence
  Primer
gcgactccgtacggagtcgcca

SEQ ID NO: 6811 - DNA, 22 bp, Artificial sequence
  Primer
gcgactccgtacggagtcgcac

SEQ ID NO: 6812 - DNA, 22 bp, Artificial sequence
  Primer
gtgactccgtacggagtcaccc

SEQ ID NO: 6813 - DNA, 22 bp, Artificial sequence
  Primer
gggactccgtacggagtcccgt

SEQ ID NO: 6814 - DNA, 22 bp, Artificial sequence
  Primer
gggactccgtacggagtccctg

SEQ ID NO: 6815 - DNA, 22 bp, Artificial sequence
  Primer
aggactccgtacggagtcctgg

SEQ ID NO: 6816 - DNA, 22 bp, Artificial sequence
  Primer
gagactccgtacggagtctcgg

SEQ ID NO: 6817 - DNA, 22 bp, Artificial sequence
  Primer
gggactccgtacggagtcccga

SEQ ID NO: 6818 - DNA, 22 bp, Artificial sequence
  Primer
gggactccgtacggagtcccag

SEQ ID NO: 6819 - DNA, 22 bp, Artificial sequence
  Primer
tggactccgtacggagtccagg

SEQ ID NO: 6820 - DNA, 22 bp, Artificial sequence
  Primer
gtgactccgtacggagtcacgg

SEQ ID NO: 6821 - DNA, 22 bp, Artificial sequence
  Primer
gcgactccgtacggagtcgccg

SEQ ID NO: 6822 - DNA, 22 bp, Artificial sequence
  Primer
gcgactccgtacggagtcgctg

SEQ ID NO: 6823 - DNA, 22 bp, Artificial sequence
  Primer
acgactccgtacggagtcgtcg

SEQ ID NO: 6824 - DNA, 22 bp, Artificial sequence
  Primer
gagactccgtacggagtctccg

SEQ ID NO: 6825 - DNA, 22 bp, Artificial sequence
  Primer
gcgactccgtacggagtcgcag

SEQ ID NO: 6826 - DNA, 22 bp, Artificial sequence
  Primer
gtgactccgtacggagtcaccg

SEQ ID NO: 6827 - DNA, 22 bp, Artificial sequence
  Primer
cggactccgtacggagtccgtg

SEQ ID NO: 6828 - DNA, 22 bp, Artificial sequence
  Primer
cagactccgtacggagtctggg

SEQ ID NO: 6829 - DNA, 22 bp, Artificial sequence
  Primer
cggactccgtacggagtccgag

SEQ ID NO: 6830 - DNA, 22 bp, Artificial sequence
  Primer
ctgactccgtacggagtcaggg

SEQ ID NO: 6831 - DNA, 22 bp, Artificial sequence
  Primer
acgactccgtacggagtcgtgg

SEQ ID NO: 6832 - DNA, 22 bp, Artificial sequence
  Primer
ccgactccgtacggagtcggct

SEQ ID NO: 6833 - DNA, 22 bp, Artificial sequence
  Primer
ccgactccgtacggagtcggca

SEQ ID NO: 6834 - DNA, 22 bp, Artificial sequence
  Primer
gagactccgtacggagtctcgc

SEQ ID NO: 6835 - DNA, 22 bp, Artificial sequence
  Primer
gtgactccgtacggagtcacgc

SEQ ID NO: 6836 - DNA, 22 bp, Artificial sequence
  Primer
aggactccgtacggagtcctgc

SEQ ID NO: 6837 - DNA, 22 bp, Artificial sequence
  Primer
tggactccgtacggagtccagc

SEQ ID NO: 6838 - DNA, 22 bp, Artificial sequence
  Primer
aggactccgtacggagtcctcg

SEQ ID NO: 6839 - DNA, 22 bp, Artificial sequence
  Primer
tggactccgtacggagtccacg

SEQ ID NO: 6840 - DNA, 22 bp, Artificial sequence
  Primer
ccgactccgtacggagtcggtg

SEQ ID NO: 6841 - DNA, 22 bp, Artificial sequence
  Primer
ccgactccgtacggagtcggag

SEQ ID NO: 6842 - DNA, 22 bp, Artificial sequence
  Primer
gggactccgtacggagtcccgc

SEQ ID NO: 6843 - DNA, 22 bp, Artificial sequence
  Primer
gggactccgtacggagtccctc

SEQ ID NO: 6844 - DNA, 22 bp, Artificial sequence
  Primer
gggactccgtacggagtcccac

SEQ ID NO: 6845 - DNA, 22 bp, Artificial sequence
  Primer
  misc_feature (1)..(2): n is a, c, g, or t
  misc_feature (19)..(22): n is a, c, g, or t
nngactccggccggagtcnnnn

SEQ ID NO: 6846 - DNA, 22 bp, Artificial sequence
  Primer
cggactccggccggagtccgcc

SEQ ID NO: 6847 - DNA, 22 bp, Artificial sequence
  Primer
cggactccggccggagtccgct

SEQ ID NO: 6848 - DNA, 22 bp, Artificial sequence
  Primer
cggactccggccggagtccgtc

SEQ ID NO: 6849 - DNA, 22 bp, Artificial sequence
  Primer
aggactccggccggagtcctcc

SEQ ID NO: 6850 - DNA, 22 bp, Artificial sequence
  Primer
cagactccggccggagtctgcc

SEQ ID NO: 6851 - DNA, 22 bp, Artificial sequence
  Primer
cggactccggccggagtccgca

SEQ ID NO: 6852 - DNA, 22 bp, Artificial sequence
  Primer
cggactccggccggagtccgac

SEQ ID NO: 6853 - DNA, 22 bp, Artificial sequence
  Primer
tggactccggccggagtccacc

SEQ ID NO: 6854 - DNA, 22 bp, Artificial sequence
  Primer
ctgactccggccggagtcagcc

SEQ ID NO: 6855 - DNA, 22 bp, Artificial sequence
  Primer
ccgactccggccggagtcgggc

SEQ ID NO: 6856 - DNA, 22 bp, Artificial sequence
  Primer
ccgactccggccggagtcgggt

SEQ ID NO: 6857 - DNA, 22 bp, Artificial sequence
  Primer
ccgactccggccggagtcggtc

SEQ ID NO: 6858 - DNA, 22 bp, Artificial sequence
  Primer
acgactccggccggagtcgtgc

SEQ ID NO: 6859 - DNA, 22 bp, Artificial sequence
  Primer
cagactccggccggagtctggc

SEQ ID NO: 6860 - DNA, 22 bp, Artificial sequence
  Primer
ccgactccggccggagtcggga

SEQ ID NO: 6861 - DNA, 22 bp, Artificial sequence
  Primer
ccgactccggccggagtcggac

SEQ ID NO: 6862 - DNA, 22 bp, Artificial sequence
  Primer
ctgactccggccggagtcaggc

SEQ ID NO: 6863 - DNA, 22 bp, Artificial sequence
  Primer
gcgactccggccggagtcgccc

SEQ ID NO: 6864 - DNA, 22 bp, Artificial sequence
  Primer
gcgactccggccggagtcgcct

SEQ ID NO: 6865 - DNA, 22 bp, Artificial sequence
  Primer
gcgactccggccggagtcgctc

SEQ ID NO: 6866 - DNA, 22 bp, Artificial sequence
  Primer
acgactccggccggagtcgtcc

SEQ ID NO: 6867 - DNA, 22 bp, Artificial sequence
  Primer
gagactccggccggagtctccc

SEQ ID NO: 6868 - DNA, 22 bp, Artificial sequence
  Primer
gcgactccggccggagtcgcca

SEQ ID NO: 6869 - DNA, 22 bp, Artificial sequence
  Primer
gcgactccggccggagtcgcac

SEQ ID NO: 6870 - DNA, 22 bp, Artificial sequence
  Primer
gtgactccggccggagtcaccc

SEQ ID NO: 6871 - DNA, 22 bp, Artificial sequence
  Primer
gggactccggccggagtcccgt

SEQ ID NO: 6872 - DNA, 22 bp, Artificial sequence
  Primer
gggactccggccggagtccctg

SEQ ID NO: 6873 - DNA, 22 bp, Artificial sequence
  Primer
aggactccggccggagtcctgg

SEQ ID NO: 6874 - DNA, 22 bp, Artificial sequence
  Primer
gagactccggccggagtctcgg

SEQ ID NO: 6875 - DNA, 22 bp, Artificial sequence
  Primer
gggactccggccggagtcccga

SEQ ID NO: 6876 - DNA, 22 bp, Artificial sequence
  Primer
gggactccggccggagtcccag

SEQ ID NO: 6877 - DNA, 22 bp, Artificial sequence
  Primer
tggactccggccggagtccagg

SEQ ID NO: 6878 - DNA, 22 bp, Artificial sequence
  Primer
gtgactccggccggagtcacgg

SEQ ID NO: 6879 - DNA, 22 bp, Artificial sequence
  Primer
gcgactccggccggagtcgccg

SEQ ID NO: 6880 - DNA, 22 bp, Artificial sequence
  Primer
gcgactccggccggagtcgctg

SEQ ID NO: 6881 - DNA, 22 bp, Artificial sequence
  Primer
acgactccggccggagtcgtcg

SEQ ID NO: 6882 - DNA, 22 bp, Artificial sequence
  Primer
gagactccggccggagtctccg

SEQ ID NO: 6883 - DNA, 22 bp, Artificial sequence
  Primer
gcgactccggccggagtcgcag

SEQ ID NO: 6884 - DNA, 22 bp, Artificial sequence
  Primer
gtgactccggccggagtcaccg

SEQ ID NO: 6885 - DNA, 22 bp, Artificial sequence
  Primer
cggactccggccggagtccgtg

SEQ ID NO: 6886 - DNA, 22 bp, Artificial sequence
  Primer
cagactccggccggagtctggg

SEQ ID NO: 6887 - DNA, 22 bp, Artificial sequence
  Primer
cggactccggccggagtccgag

SEQ ID NO: 6888 - DNA, 22 bp, Artificial sequence
  Primer
ctgactccggccggagtcaggg

SEQ ID NO: 6889 - DNA, 22 bp, Artificial sequence
  Primer
acgactccggccggagtcgtgg

SEQ ID NO: 6890 - DNA, 22 bp, Artificial sequence
  Primer
ccgactccggccggagtcggct

SEQ ID NO: 6891 - DNA, 22 bp, Artificial sequence
  Primer
ccgactccggccggagtcggca

SEQ ID NO: 6892 - DNA, 22 bp, Artificial sequence
  Primer
gagactccggccggagtctcgc

SEQ ID NO: 6893 - DNA, 22 bp, Artificial sequence
  Primer
gtgactccggccggagtcacgc

SEQ ID NO: 6894 - DNA, 22 bp, Artificial sequence
  Primer
aggactccggccggagtcctgc

SEQ ID NO: 6895 - DNA, 22 bp, Artificial sequence
  Primer
tggactccggccggagtccagc

SEQ ID NO: 6896 - DNA, 22 bp, Artificial sequence
  Primer
aggactccggccggagtcctcg

SEQ ID NO: 6897 - DNA, 22 bp, Artificial sequence
  Primer
tggactccggccggagtccacg

SEQ ID NO: 6898 - DNA, 22 bp, Artificial sequence
  Primer
ccgactccggccggagtcggtg

SEQ ID NO: 6899 - DNA, 22 bp, Artificial sequence
  Primer
ccgactccggccggagtcggag

SEQ ID NO: 6900 - DNA, 22 bp, Artificial sequence
  Primer
gggactccggccggagtcccgc

SEQ ID NO: 6901 - DNA, 22 bp, Artificial sequence
  Primer
gggactccggccggagtccctc

SEQ ID NO: 6902 - DNA, 22 bp, Artificial sequence
  Primer
gggactccggccggagtcccac

SEQ ID NO: 6903 - DNA, 22 bp, Artificial sequence
  Primer
  misc_feature (1)..(2): n is a, c, g, or t
  misc_feature (19)..(22): n is a, c, g, or t
nngactccgcgcggagtcnnnn

SEQ ID NO: 6904 - DNA, 22 bp, Artificial sequence
  Primer
cggactccgcgcggagtccgcc

SEQ ID NO: 6905 - DNA, 22 bp, Artificial sequence
  Primer
cggactccgcgcggagtccgct

SEQ ID NO: 6906 - DNA, 22 bp, Artificial sequence
  Primer
cggactccgcgcggagtccgtc

SEQ ID NO: 6907 - DNA, 22 bp, Artificial sequence
  Primer
aggactccgcgcggagtcctcc

SEQ ID NO: 6908 - DNA, 22 bp, Artificial sequence
  Primer
cagactccgcgcggagtctgcc

SEQ ID NO: 6909 - DNA, 22 bp, Artificial sequence
  Primer
cggactccgcgcggagtccgca

SEQ ID NO: 6910 - DNA, 22 bp, Artificial sequence
  Primer
cggactccgcgcggagtccgac

SEQ ID NO: 6911 - DNA, 22 bp, Artificial sequence
  Primer
tggactccgcgcggagtccacc

SEQ ID NO: 6912 - DNA, 22 bp, Artificial sequence
  Primer
ctgactccgcgcggagtcagcc

SEQ ID NO: 6913 - DNA, 22 bp, Artificial sequence
  Primer
ccgactccgcgcggagtcgggc

SEQ ID NO: 6914 - DNA, 22 bp, Artificial sequence
  Primer
ccgactccgcgcggagtcgggt

SEQ ID NO: 6915 - DNA, 22 bp, Artificial sequence
  Primer
ccgactccgcgcggagtcggtc

SEQ ID NO: 6916 - DNA, 22 bp, Artificial sequence
  Primer
acgactccgcgcggagtcgtgc

SEQ ID NO: 6917 - DNA, 22 bp, Artificial sequence
  Primer
cagactccgcgcggagtctggc

SEQ ID NO: 6918 - DNA, 22 bp, Artificial sequence
  Primer
ccgactccgcgcggagtcggga

SEQ ID NO: 6919 - DNA, 22 bp, Artificial sequence
  Primer
ccgactccgcgcggagtcggac

SEQ ID NO: 6920 - DNA, 22 bp, Artificial sequence
  Primer
ctgactccgcgcggagtcaggc

SEQ ID NO: 6921 - DNA, 22 bp, Artificial sequence
  Primer
gcgactccgcgcggagtcgccc

SEQ ID NO: 6922 - DNA, 22 bp, Artificial sequence
  Primer
gcgactccgcgcggagtcgcct

SEQ ID NO: 6923 - DNA, 22 bp, Artificial sequence
  Primer
gcgactccgcgcggagtcgctc

SEQ ID NO: 6924 - DNA, 22 bp, Artificial sequence
  Primer
acgactccgcgcggagtcgtcc

SEQ ID NO: 6925 - DNA, 22 bp, Artificial sequence
  Primer
gagactccgcgcggagtctccc

SEQ ID NO: 6926 - DNA, 22 bp, Artificial sequence
  Primer
gcgactccgcgcggagtcgcca

SEQ ID NO: 6927 - DNA, 22 bp, Artificial sequence
  Primer
gcgactccgcgcggagtcgcac

SEQ ID NO: 6928 - DNA, 22 bp, Artificial sequence
  Primer
gtgactccgcgcggagtcaccc

SEQ ID NO: 6929 - DNA, 22 bp, Artificial sequence
  Primer
gggactccgcgcggagtcccgt

SEQ ID NO: 6930 - DNA, 22 bp, Artificial sequence
  Primer
gggactccgcgcggagtccctg

SEQ ID NO: 6931 - DNA, 22 bp, Artificial sequence
  Primer
aggactccgcgcggagtcctgg

SEQ ID NO: 6932 - DNA, 22 bp, Artificial sequence
  Primer
gagactccgcgcggagtctcgg

SEQ ID NO: 6933 - DNA, 22 bp, Artificial sequence
  Primer
gggactccgcgcggagtcccga

SEQ ID NO: 6934 - DNA, 22 bp, Artificial sequence
  Primer
gggactccgcgcggagtcccag

SEQ ID NO: 6935 - DNA, 22 bp, Artificial sequence
  Primer
tggactccgcgcggagtccagg

SEQ ID NO: 6936 - DNA, 22 bp, Artificial sequence
  Primer
gtgactccgcgcggagtcacgg

SEQ ID NO: 6937 - DNA, 22 bp, Artificial sequence
  Primer
gcgactccgcgcggagtcgccg

SEQ ID NO: 6938 - DNA, 22 bp, Artificial sequence
  Primer
gcgactccgcgcggagtcgctg

SEQ ID NO: 6939 - DNA, 22 bp, Artificial sequence
  Primer
acgactccgcgcggagtcgtcg

SEQ ID NO: 6940 - DNA, 22 bp, Artificial sequence
  Primer
gagactccgcgcggagtctccg

SEQ ID NO: 6941 - DNA, 22 bp, Artificial sequence
  Primer
gcgactccgcgcggagtcgcag

SEQ ID NO: 6942 - DNA, 22 bp, Artificial sequence
  Primer
gtgactccgcgcggagtcaccg

SEQ ID NO: 6943 - DNA, 22 bp, Artificial sequence
  Primer
cggactccgcgcggagtccgtg

SEQ ID NO: 6944 - DNA, 22 bp, Artificial sequence
  Primer
cagactccgcgcggagtctggg

SEQ ID NO: 6945 - DNA, 22 bp, Artificial sequence
  Primer
cggactccgcgcggagtccgag

SEQ ID NO: 6946 - DNA, 22 bp, Artificial sequence
  Primer
ctgactccgcgcggagtcaggg

SEQ ID NO: 6947 - DNA, 22 bp, Artificial sequence
  Primer
acgactccgcgcggagtcgtgg

SEQ ID NO: 6948 - DNA, 22 bp, Artificial sequence
  Primer
ccgactccgcgcggagtcggct

SEQ ID NO: 6949 - DNA, 22 bp, Artificial sequence
  Primer
ccgactccgcgcggagtcggca

SEQ ID NO: 6950 - DNA, 22 bp, Artificial sequence
  Primer
gagactccgcgcggagtctcgc

SEQ ID NO: 6951 - DNA, 22 bp, Artificial sequence
  Primer
gtgactccgcgcggagtcacgc

SEQ ID NO: 6952 - DNA, 22 bp, Artificial sequence
  Primer
aggactccgcgcggagtcctgc

SEQ ID NO: 6953 - DNA, 22 bp, Artificial sequence
  Primer
tggactccgcgcggagtccagc

SEQ ID NO: 6954 - DNA, 22 bp, Artificial sequence
  Primer
aggactccgcgcggagtcctcg

SEQ ID NO: 6955 - DNA, 22 bp, Artificial sequence
  Primer
tggactccgcgcggagtccacg

SEQ ID NO: 6956 - DNA, 22 bp, Artificial sequence
  Primer
ccgactccgcgcggagtcggtg

SEQ ID NO: 6957 - DNA, 22 bp, Artificial sequence
  Primer
ccgactccgcgcggagtcggag

SEQ ID NO: 6958 - DNA, 22 bp, Artificial sequence
  Primer
gggactccgcgcggagtcccgc

SEQ ID NO: 6959 - DNA, 22 bp, Artificial sequence
  Primer
gggactccgcgcggagtccctc

SEQ ID NO: 6960 - DNA, 22 bp, Artificial sequence
  Primer
gggactccgcgcggagtcccac

SEQ ID NO: 6961 - DNA, 22 bp, Artificial sequence
  Primer
  misc_feature (1)..(2): n is a, c, g, or t
  misc_feature (19)..(22): n is a, c, g, or t
nngactctgatcagagtcnnnn

SEQ ID NO: 6962 - DNA, 22 bp, Artificial sequence
  Primer
cggactctgatcagagtccgcc

SEQ ID NO: 6963 - DNA, 22 bp, Artificial sequence
  Primer
cggactctgatcagagtccgct

SEQ ID NO: 6964 - DNA, 22 bp, Artificial sequence
  Primer
cggactctgatcagagtccgtc

SEQ ID NO: 6965 - DNA, 22 bp, Artificial sequence
  Primer
aggactctgatcagagtcctcc

SEQ ID NO: 6966 - DNA, 22 bp, Artificial sequence
  Primer
cagactctgatcagagtctgcc

SEQ ID NO: 6967 - DNA, 22 bp, Artificial sequence
  Primer
cggactctgatcagagtccgca

SEQ ID NO: 6968 - DNA, 22 bp, Artificial sequence
  Primer
cggactctgatcagagtccgac

SEQ ID NO: 6969 - DNA, 22 bp, Artificial sequence
  Primer
tggactctgatcagagtccacc

SEQ ID NO: 6970 - DNA, 22 bp, Artificial sequence
  Primer
ctgactctgatcagagtcagcc

SEQ ID NO: 6971 - DNA, 22 bp, Artificial sequence
  Primer
ccgactctgatcagagtcgggc

SEQ ID NO: 6972 - DNA, 22 bp, Artificial sequence
  Primer
ccgactctgatcagagtcgggt

SEQ ID NO: 6973 - DNA, 22 bp, Artificial sequence
  Primer
ccgactctgatcagagtcggtc

SEQ ID NO: 6974 - DNA, 22 bp, Artificial sequence
  Primer
acgactctgatcagagtcgtgc

SEQ ID NO: 6975 - DNA, 22 bp, Artificial sequence
  Primer
cagactctgatcagagtctggc

SEQ ID NO: 6976 - DNA, 22 bp, Artificial sequence
  Primer
ccgactctgatcagagtcggga

SEQ ID NO: 6977 - DNA, 22 bp, Artificial sequence
  Primer
ccgactctgatcagagtcggac

SEQ ID NO: 6978 - DNA, 22 bp, Artificial sequence
  Primer
ctgactctgatcagagtcaggc

SEQ ID NO: 6979 - DNA, 22 bp, Artificial sequence
  Primer
gcgactctgatcagagtcgccc

SEQ ID NO: 6980 - DNA, 22 bp, Artificial sequence
  Primer
gcgactctgatcagagtcgcct

SEQ ID NO: 6981 - DNA, 22 bp, Artificial sequence
  Primer
gcgactctgatcagagtcgctc

SEQ ID NO: 6982 - DNA, 22 bp, Artificial sequence
  Primer
acgactctgatcagagtcgtcc

SEQ ID NO: 6983 - DNA, 22 bp, Artificial sequence
  Primer
gagactctgatcagagtctccc

SEQ ID NO: 6984 - DNA, 22 bp, Artificial sequence
  Primer
gcgactctgatcagagtcgcca

SEQ ID NO: 6985 - DNA, 22 bp, Artificial sequence
  Primer
gcgactctgatcagagtcgcac

SEQ ID NO: 6986 - DNA, 22 bp, Artificial sequence
  Primer
gtgactctgatcagagtcaccc

SEQ ID NO: 6987 - DNA, 22 bp, Artificial sequence
  Primer
gggactctgatcagagtcccgt

SEQ ID NO: 6988 - DNA, 22 bp, Artificial sequence
  Primer
gggactctgatcagagtccctg

SEQ ID NO: 6989 - DNA, 22 bp, Artificial sequence
  Primer
aggactctgatcagagtcctgg

SEQ ID NO: 6990 - DNA, 22 bp, Artificial sequence
  Primer
gagactctgatcagagtctcgg

SEQ ID NO: 6991 - DNA, 22 bp, Artificial sequence
  Primer
gggactctgatcagagtcccga

SEQ ID NO: 6992 - DNA, 22 bp, Artificial sequence
  Primer
gggactctgatcagagtcccag

SEQ ID NO: 6993 - DNA, 22 bp, Artificial sequence
  Primer
tggactctgatcagagtccagg

SEQ ID NO: 6994 - DNA, 22 bp, Artificial sequence
  Primer
gtgactctgatcagagtcacgg

SEQ ID NO: 6995 - DNA, 22 bp, Artificial sequence
  Primer
gcgactctgatcagagtcgccg

SEQ ID NO: 6996 - DNA, 22 bp, Artificial sequence
  Primer
gcgactctgatcagagtcgctg

SEQ ID NO: 6997 - DNA, 22 bp, Artificial sequence
  Primer
acgactctgatcagagtcgtcg

SEQ ID NO: 6998 - DNA, 22 bp, Artificial sequence
  Primer
gagactctgatcagagtctccg

SEQ ID NO: 6999 - DNA, 22 bp, Artificial sequence
  Primer
gcgactctgatcagagtcgcag

SEQ ID NO: 7000 - DNA, 22 bp, Artificial sequence
  Primer
gtgactctgatcagagtcaccg

SEQ ID NO: 7001 - DNA, 22 bp, Artificial sequence
  Primer
cggactctgatcagagtccgtg

SEQ ID NO: 7002 - DNA, 22 bp, Artificial sequence
  Primer
cagactctgatcagagtctggg

SEQ ID NO: 7003 - DNA, 22 bp, Artificial sequence
  Primer
cggactctgatcagagtccgag

SEQ ID NO: 7004 - DNA, 22 bp, Artificial sequence
  Primer
ctgactctgatcagagtcaggg

SEQ ID NO: 7005 - DNA, 22 bp, Artificial sequence
  Primer
acgactctgatcagagtcgtgg

SEQ ID NO: 7006 - DNA, 22 bp, Artificial sequence
  Primer
ccgactctgatcagagtcggct

SEQ ID NO: 7007 - DNA, 22 bp, Artificial sequence
  Primer
ccgactctgatcagagtcggca

SEQ ID NO: 7008 - DNA, 22 bp, Artificial sequence
  Primer
gagactctgatcagagtctcgc

SEQ ID NO: 7009 - DNA, 22 bp, Artificial sequence
  Primer
gtgactctgatcagagtcacgc

SEQ ID NO: 7010 - DNA, 22 bp, Artificial sequence
  Primer
aggactctgatcagagtcctgc

SEQ ID NO: 7011 - DNA, 22 bp, Artificial sequence
  Primer
tggactctgatcagagtccagc

SEQ ID NO: 7012 - DNA, 22 bp, Artificial sequence
  Primer
aggactctgatcagagtcctcg

SEQ ID NO: 7013 - DNA, 22 bp, Artificial sequence
  Primer
tggactctgatcagagtccacg

SEQ ID NO: 7014 - DNA, 22 bp, Artificial sequence
  Primer
ccgactctgatcagagtcggtg

SEQ ID NO: 7015 - DNA, 22 bp, Artificial sequence
  Primer
ccgactctgatcagagtcggag

SEQ ID NO: 7016 - DNA, 22 bp, Artificial sequence
  Primer
gggactctgatcagagtcccgc

SEQ ID NO: 7017 - DNA, 22 bp, Artificial sequence
  Primer
gggactctgatcagagtccctc

SEQ ID NO: 7018 - DNA, 22 bp, Artificial sequence
  Primer
gggactctgatcagagtcccac

SEQ ID NO: 7019 - DNA, 22 bp, Artificial sequence
  Primer
  misc_feature (1)..(2): n is a, c, g, or t
  misc_feature (19)..(22): n is a, c, g, or t
nngactctgtacagagtcnnnn

SEQ ID NO: 7020 - DNA, 22 bp, Artificial sequence
  Primer
cggactctgtacagagtccgcc

SEQ ID NO: 7021 - DNA, 22 bp, Artificial sequence
  Primer
cggactctgtacagagtccgct

SEQ ID NO: 7022 - DNA, 22 bp, Artificial sequence
  Primer
cggactctgtacagagtccgtc

SEQ ID NO: 7023 - DNA, 22 bp, Artificial sequence
  Primer
aggactctgtacagagtcctcc

SEQ ID NO: 7024 - DNA, 22 bp, Artificial sequence
  Primer
cagactctgtacagagtctgcc

SEQ ID NO: 7025 - DNA, 22 bp, Artificial sequence
  Primer
cggactctgtacagagtccgca

SEQ ID NO: 7026 - DNA, 22 bp, Artificial sequence
  Primer
cggactctgtacagagtccgac

SEQ ID NO: 7027 - DNA, 22 bp, Artificial sequence
  Primer
tggactctgtacagagtccacc

SEQ ID NO: 7028 - DNA, 22 bp, Artificial sequence
  Primer
ctgactctgtacagagtcagcc

SEQ ID NO: 7029 - DNA, 22 bp, Artificial sequence
  Primer
ccgactctgtacagagtcgggc

SEQ ID NO: 7030 - DNA, 22 bp, Artificial sequence
  Primer
ccgactctgtacagagtcgggt

SEQ ID NO: 7031 - DNA, 22 bp, Artificial sequence
  Primer
ccgactctgtacagagtcggtc

SEQ ID NO: 7032 - DNA, 22 bp, Artificial sequence
  Primer
acgactctgtacagagtcgtgc

SEQ ID NO: 7033 - DNA, 22 bp, Artificial sequence
  Primer
cagactctgtacagagtctggc

SEQ ID NO: 7034 - DNA, 22 bp, Artificial sequence
  Primer
ccgactctgtacagagtcggga

SEQ ID NO: 7035 - DNA, 22 bp, Artificial sequence
  Primer
ccgactctgtacagagtcggac

SEQ ID NO: 7036 - DNA, 22 bp, Artificial sequence
  Primer
ctgactctgtacagagtcaggc

SEQ ID NO: 7037 - DNA, 22 bp, Artificial sequence
  Primer
gcgactctgtacagagtcgccc

SEQ ID NO: 7038 - DNA, 22 bp, Artificial sequence
  Primer
gcgactctgtacagagtcgcct

SEQ ID NO: 7039 - DNA, 22 bp, Artificial sequence
  Primer
gcgactctgtacagagtcgctc

SEQ ID NO: 7040 - DNA, 22 bp, Artificial sequence
  Primer
acgactctgtacagagtcgtcc

SEQ ID NO: 7041 - DNA, 22 bp, Artificial sequence
  Primer
gagactctgtacagagtctccc

SEQ ID NO: 7042 - DNA, 22 bp, Artificial sequence
  Primer
gcgactctgtacagagtcgcca

SEQ ID NO: 7043 - DNA, 22 bp, Artificial sequence
  Primer
gcgactctgtacagagtcgcac

SEQ ID NO: 7044 - DNA, 22 bp, Artificial sequence
  Primer
gtgactctgtacagagtcaccc

SEQ ID NO: 7045 - DNA, 22 bp, Artificial sequence
  Primer
gggactctgtacagagtcccgt

SEQ ID NO: 7046 - DNA, 22 bp, Artificial sequence
  Primer
gggactctgtacagagtccctg

SEQ ID NO: 7047 - DNA, 22 bp, Artificial sequence
  Primer
aggactctgtacagagtcctgg

SEQ ID NO: 7048 - DNA, 22 bp, Artificial sequence
  Primer
gagactctgtacagagtctcgg

SEQ ID NO: 7049 - DNA, 22 bp, Artificial sequence
  Primer
gggactctgtacagagtcccga

SEQ ID NO: 7050 - DNA, 22 bp, Artificial sequence
  Primer
gggactctgtacagagtcccag

SEQ ID NO: 7051 - DNA, 22 bp, Artificial sequence
  Primer
tggactctgtacagagtccagg

SEQ ID NO: 7052 - DNA, 22 bp, Artificial sequence
  Primer
gtgactctgtacagagtcacgg

SEQ ID NO: 7053 - DNA, 22 bp, Artificial sequence
  Primer
gcgactctgtacagagtcgccg

SEQ ID NO: 7054 - DNA, 22 bp, Artificial sequence
  Primer
gcgactctgtacagagtcgctg

SEQ ID NO: 7055 - DNA, 22 bp, Artificial sequence
  Primer
acgactctgtacagagtcgtcg

SEQ ID NO: 7056 - DNA, 22 bp, Artificial sequence
  Primer
gagactctgtacagagtctccg

SEQ ID NO: 7057 - DNA, 22 bp, Artificial sequence
  Primer
gcgactctgtacagagtcgcag

SEQ ID NO: 7058 - DNA, 22 bp, Artificial sequence
  Primer
gtgactctgtacagagtcaccg

SEQ ID NO: 7059 - DNA, 22 bp, Artificial sequence
  Primer
cggactctgtacagagtccgtg

SEQ ID NO: 7060 - DNA, 22 bp, Artificial sequence
  Primer
cagactctgtacagagtctggg

SEQ ID NO: 7061 - DNA, 22 bp, Artificial sequence
  Primer
cggactctgtacagagtccgag

SEQ ID NO: 7062 - DNA, 22 bp, Artificial sequence
  Primer
ctgactctgtacagagtcaggg

SEQ ID NO: 7063 - DNA, 22 bp, Artificial sequence
  Primer
acgactctgtacagagtcgtgg

SEQ ID NO: 7064 - DNA, 22 bp, Artificial sequence
  Primer
ccgactctgtacagagtcggct

SEQ ID NO: 7065 - DNA, 22 bp, Artificial sequence
  Primer
ccgactctgtacagagtcggca

SEQ ID NO: 7066 - DNA, 22 bp, Artificial sequence
  Primer
gagactctgtacagagtctcgc

SEQ ID NO: 7067 - DNA, 22 bp, Artificial sequence
  Primer
gtgactctgtacagagtcacgc

SEQ ID NO: 7068 - DNA, 22 bp, Artificial sequence
  Primer
aggactctgtacagagtcctgc

SEQ ID NO: 7069 - DNA, 22 bp, Artificial sequence
  Primer
tggactctgtacagagtccagc

SEQ ID NO: 7070 - DNA, 22 bp, Artificial sequence
  Primer
aggactctgtacagagtcctcg

SEQ ID NO: 7071 - DNA, 22 bp, Artificial sequence
  Primer
tggactctgtacagagtccacg

SEQ ID NO: 7072 - DNA, 22 bp, Artificial sequence
  Primer
ccgactctgtacagagtcggtg

SEQ ID NO: 7073 - DNA, 22 bp, Artificial sequence
  Primer
ccgactctgtacagagtcggag

SEQ ID NO: 7074 - DNA, 22 bp, Artificial sequence
  Primer
gggactctgtacagagtcccgc

SEQ ID NO: 7075 - DNA, 22 bp, Artificial sequence
  Primer
gggactctgtacagagtccctc

SEQ ID NO: 7076 - DNA, 22 bp, Artificial sequence
  Primer
gggactctgtacagagtcccac

SEQ ID NO: 7077 - DNA, 22 bp, Artificial sequence
  Primer
  misc_feature (1)..(2): n is a, c, g, or t
  misc_feature (19)..(22): n is a, c, g, or t
nngactctggccagagtcnnnn

SEQ ID NO: 7078 - DNA, 22 bp, Artificial sequence
  Primer
cggactctggccagagtccgcc

SEQ ID NO: 7079 - DNA, 22 bp, Artificial sequence
  Primer
cggactctggccagagtccgct

SEQ ID NO: 7080 - DNA, 22 bp, Artificial sequence
  Primer
cggactctggccagagtccgtc

SEQ ID NO: 7081 - DNA, 22 bp, Artificial sequence
  Primer
aggactctggccagagtcctcc

SEQ ID NO: 7082 - DNA, 22 bp, Artificial sequence
  Primer
cagactctggccagagtctgcc

SEQ ID NO: 7083 - DNA, 22 bp, Artificial sequence
  Primer
cggactctggccagagtccgca

SEQ ID NO: 7084 - DNA, 22 bp, Artificial sequence
  Primer
cggactctggccagagtccgac

SEQ ID NO: 7085 - DNA, 22 bp, Artificial sequence
  Primer
tggactctggccagagtccacc

SEQ ID NO: 7086 - DNA, 22 bp, Artificial sequence
  Primer
ctgactctggccagagtcagcc

SEQ ID NO: 7087 - DNA, 22 bp, Artificial sequence
  Primer
ccgactctggccagagtcgggc

SEQ ID NO: 7088 - DNA, 22 bp, Artificial sequence
  Primer
ccgactctggccagagtcgggt

SEQ ID NO: 7089 - DNA, 22 bp, Artificial sequence
  Primer
ccgactctggccagagtcggtc

SEQ ID NO: 7090 - DNA, 22 bp, Artificial sequence
  Primer
acgactctggccagagtcgtgc

SEQ ID NO: 7091 - DNA, 22 bp, Artificial sequence
  Primer
cagactctggccagagtctggc

SEQ ID NO: 7092 - DNA, 22 bp, Artificial sequence
  Primer
ccgactctggccagagtcggga

SEQ ID NO: 7093 - DNA, 22 bp, Artificial sequence
  Primer
ccgactctggccagagtcggac

SEQ ID NO: 7094 - DNA, 22 bp, Artificial sequence
  Primer
ctgactctggccagagtcaggc

SEQ ID NO: 7095 - DNA, 22 bp, Artificial sequence
  Primer
gcgactctggccagagtcgccc

SEQ ID NO: 7096 - DNA, 22 bp, Artificial sequence
  Primer
gcgactctggccagagtcgcct

SEQ ID NO: 7097 - DNA, 22 bp, Artificial sequence
  Primer
gcgactctggccagagtcgctc

SEQ ID NO: 7098 - DNA, 22 bp, Artificial sequence
  Primer
acgactctggccagagtcgtcc

SEQ ID NO: 7099 - DNA, 22 bp, Artificial sequence
  Primer
gagactctggccagagtctccc

SEQ ID NO: 7100 - DNA, 22 bp, Artificial sequence
  Primer
gcgactctggccagagtcgcca

SEQ ID NO: 7101 - DNA, 22 bp, Artificial sequence
  Primer
gcgactctggccagagtcgcac

SEQ ID NO: 7102 - DNA, 22 bp, Artificial sequence
  Primer
gtgactctggccagagtcaccc

SEQ ID NO: 7103 - DNA, 22 bp, Artificial sequence
  Primer
gggactctggccagagtcccgt

SEQ ID NO: 7104 - DNA, 22 bp, Artificial sequence
  Primer
gggactctggccagagtccctg

SEQ ID NO: 7105 - DNA, 22 bp, Artificial sequence
  Primer
aggactctggccagagtcctgg

SEQ ID NO: 7106 - DNA, 22 bp, Artificial sequence
  Primer
gagactctggccagagtctcgg

SEQ ID NO: 7107 - DNA, 22 bp, Artificial sequence
  Primer
gggactctggccagagtcccga

SEQ ID NO: 7108 - DNA, 22 bp, Artificial sequence
  Primer
gggactctggccagagtcccag

SEQ ID NO: 7109 - DNA, 22 bp, Artificial sequence
  Primer
tggactctggccagagtccagg

SEQ ID NO: 7110 - DNA, 22 bp, Artificial sequence
  Primer
gtgactctggccagagtcacgg

SEQ ID NO: 7111 - DNA, 22 bp, Artificial sequence
  Primer
gcgactctggccagagtcgccg

SEQ ID NO: 7112 - DNA, 22 bp, Artificial sequence
  Primer
gcgactctggccagagtcgctg

SEQ ID NO: 7113 - DNA, 22 bp, Artificial sequence
  Primer
acgactctggccagagtcgtcg

SEQ ID NO: 7114 - DNA, 22 bp, Artificial sequence
  Primer
gagactctggccagagtctccg

SEQ ID NO: 7115 - DNA, 22 bp, Artificial sequence
  Primer
gcgactctggccagagtcgcag

SEQ ID NO: 7116 - DNA, 22 bp, Artificial sequence
  Primer
gtgactctggccagagtcaccg

SEQ ID NO: 7117 - DNA, 22 bp, Artificial sequence
  Primer
cggactctggccagagtccgtg

SEQ ID NO: 7118 - DNA, 22 bp, Artificial sequence
  Primer
cagactctggccagagtctggg

SEQ ID NO: 7119 - DNA, 22 bp, Artificial sequence
  Primer
cggactctggccagagtccgag

SEQ ID NO: 7120 - DNA, 22 bp, Artificial sequence
  Primer
ctgactctggccagagtcaggg

SEQ ID NO: 7121 - DNA, 22 bp, Artificial sequence
  Primer
acgactctggccagagtcgtgg

SEQ ID NO: 7122 - DNA, 22 bp, Artificial sequence
  Primer
ccgactctggccagagtcggct

SEQ ID NO: 7123 - DNA, 22 bp, Artificial sequence
  Primer
ccgactctggccagagtcggca

SEQ ID NO: 7124 - DNA, 22 bp, Artificial sequence
  Primer
gagactctggccagagtctcgc

SEQ ID NO: 7125 - DNA, 22 bp, Artificial sequence
  Primer
gtgactctggccagagtcacgc

SEQ ID NO: 7126 - DNA, 22 bp, Artificial sequence
  Primer
aggactctggccagagtcctgc

SEQ ID NO: 7127 - DNA, 22 bp, Artificial sequence
  Primer
tggactctggccagagtccagc

SEQ ID NO: 7128 - DNA, 22 bp, Artificial sequence
  Primer
aggactctggccagagtcctcg

SEQ ID NO: 7129 - DNA, 22 bp, Artificial sequence
  Primer
tggactctggccagagtccacg

SEQ ID NO: 7130 - DNA, 22 bp, Artificial sequence
  Primer
ccgactctggccagagtcggtg

SEQ ID NO: 7131 - DNA, 22 bp, Artificial sequence
  Primer
ccgactctggccagagtcggag

SEQ ID NO: 7132 - DNA, 22 bp, Artificial sequence
  Primer
gggactctggccagagtcccgc

SEQ ID NO: 7133 - DNA, 22 bp, Artificial sequence
  Primer
gggactctggccagagtccctc

SEQ ID NO: 7134 - DNA, 22 bp, Artificial sequence
  Primer
gggactctggccagagtcccac

SEQ ID NO: 7135 - DNA, 22 bp, Artificial sequence
  Primer
  misc_feature (1)..(2): n is a, c, g, or t
  misc_feature (19)..(22): n is a, c, g, or t
nngactctgcgcagagtcnnnn

SEQ ID NO: 7136 - DNA, 22 bp, Artificial sequence
  Primer
cggactctgcgcagagtccgcc

SEQ ID NO: 7137 - DNA, 22 bp, Artificial sequence
  Primer
cggactctgcgcagagtccgct

SEQ ID NO: 7138 - DNA, 22 bp, Artificial sequence
  Primer
cggactctgcgcagagtccgtc

SEQ ID NO: 7139 - DNA, 22 bp, Artificial sequence
  Primer
aggactctgcgcagagtcctcc

SEQ ID NO: 7140 - DNA, 22 bp, Artificial sequence
  Primer
cagactctgcgcagagtctgcc

SEQ ID NO: 7141 - DNA, 22 bp, Artificial sequence
  Primer
cggactctgcgcagagtccgca

SEQ ID NO: 7142 - DNA, 22 bp, Artificial sequence
  Primer
cggactctgcgcagagtccgac

SEQ ID NO: 7143 - DNA, 22 bp, Artificial sequence
  Primer
tggactctgcgcagagtccacc

SEQ ID NO: 7144 - DNA, 22 bp, Artificial sequence
  Primer
ctgactctgcgcagagtcagcc

SEQ ID NO: 7145 - DNA, 22 bp, Artificial sequence
  Primer
ccgactctgcgcagagtcgggc

SEQ ID NO: 7146 - DNA, 22 bp, Artificial sequence
  Primer
ccgactctgcgcagagtcgggt

SEQ ID NO: 7147 - DNA, 22 bp, Artificial sequence
  Primer
ccgactctgcgcagagtcggtc

SEQ ID NO: 7148 - DNA, 22 bp, Artificial sequence
  Primer
acgactctgcgcagagtcgtgc

SEQ ID NO: 7149 - DNA, 22 bp, Artificial sequence
  Primer
cagactctgcgcagagtctggc

SEQ ID NO: 7150 - DNA, 22 bp, Artificial sequence
  Primer
ccgactctgcgcagagtcggga

SEQ ID NO: 7151 - DNA, 22 bp, Artificial sequence
  Primer
ccgactctgcgcagagtcggac

SEQ ID NO: 7152 - DNA, 22 bp, Artificial sequence
  Primer
ctgactctgcgcagagtcaggc

SEQ ID NO: 7153 - DNA, 22 bp, Artificial sequence
  Primer
gcgactctgcgcagagtcgccc

SEQ ID NO: 7154 - DNA, 22 bp, Artificial sequence
  Primer
gcgactctgcgcagagtcgcct

SEQ ID NO: 7155 - DNA, 22 bp, Artificial sequence
  Primer
gcgactctgcgcagagtcgctc

SEQ ID NO: 7156 - DNA, 22 bp, Artificial sequence
  Primer
acgactctgcgcagagtcgtcc

SEQ ID NO: 7157 - DNA, 22 bp, Artificial sequence
  Primer
gagactctgcgcagagtctccc

SEQ ID NO: 7158 - DNA, 22 bp, Artificial sequence
  Primer
gcgactctgcgcagagtcgcca

SEQ ID NO: 7159 - DNA, 22 bp, Artificial sequence
  Primer
gcgactctgcgcagagtcgcac

SEQ ID NO: 7160 - DNA, 22 bp, Artificial sequence
  Primer
gtgactctgcgcagagtcaccc

SEQ ID NO: 7161 - DNA, 22 bp, Artificial sequence
  Primer
gggactctgcgcagagtcccgt

SEQ ID NO: 7162 - DNA, 22 bp, Artificial sequence
  Primer
gggactctgcgcagagtccctg

SEQ ID NO: 7163 - DNA, 22 bp, Artificial sequence
  Primer
aggactctgcgcagagtcctgg

SEQ ID NO: 7164 - DNA, 22 bp, Artificial sequence
  Primer
gagactctgcgcagagtctcgg

SEQ ID NO: 7165 - DNA, 22 bp, Artificial sequence
  Primer
gggactctgcgcagagtcccga

SEQ ID NO: 7166 - DNA, 22 bp, Artificial sequence
  Primer
gggactctgcgcagagtcccag

SEQ ID NO: 7167 - DNA, 22 bp, Artificial sequence
  Primer
tggactctgcgcagagtccagg

SEQ ID NO: 7168 - DNA, 22 bp, Artificial sequence
  Primer
gtgactctgcgcagagtcacgg

SEQ ID NO: 7169 - DNA, 22 bp, Artificial sequence
  Primer
gcgactctgcgcagagtcgccg

SEQ ID NO: 7170 - DNA, 22 bp, Artificial sequence
  Primer
gcgactctgcgcagagtcgctg

SEQ ID NO: 7171 - DNA, 22 bp, Artificial sequence
  Primer
acgactctgcgcagagtcgtcg

SEQ ID NO: 7172 - DNA, 22 bp, Artificial sequence
  Primer
gagactctgcgcagagtctccg

SEQ ID NO: 7173 - DNA, 22 bp, Artificial sequence
  Primer
gcgactctgcgcagagtcgcag

SEQ ID NO: 7174 - DNA, 22 bp, Artificial sequence
  Primer
gtgactctgcgcagagtcaccg

SEQ ID NO: 7175 - DNA, 22 bp, Artificial sequence
  Primer
cggactctgcgcagagtccgtg

SEQ ID NO: 7176 - DNA, 22 bp, Artificial sequence
  Primer
cagactctgcgcagagtctggg

SEQ ID NO: 7177 - DNA, 22 bp, Artificial sequence
  Primer
cggactctgcgcagagtccgag

SEQ ID NO: 7178 - DNA, 22 bp, Artificial sequence
  Primer
ctgactctgcgcagagtcaggg

SEQ ID NO: 7179 - DNA, 22 bp, Artificial sequence
  Primer
acgactctgcgcagagtcgtgg

SEQ ID NO: 7180 - DNA, 22 bp, Artificial sequence
  Primer
ccgactctgcgcagagtcggct

SEQ ID NO: 7181 - DNA, 22 bp, Artificial sequence
  Primer
ccgactctgcgcagagtcggca

SEQ ID NO: 7182 - DNA, 22 bp, Artificial sequence
  Primer
gagactctgcgcagagtctcgc

SEQ ID NO: 7183 - DNA, 22 bp, Artificial sequence
  Primer
gtgactctgcgcagagtcacgc

SEQ ID NO: 7184 - DNA, 22 bp, Artificial sequence
  Primer
aggactctgcgcagagtcctgc

SEQ ID NO: 7185 - DNA, 22 bp, Artificial sequence
  Primer
tggactctgcgcagagtccagc

SEQ ID NO: 7186 - DNA, 22 bp, Artificial sequence
  Primer
aggactctgcgcagagtcctcg

SEQ ID NO: 7187 - DNA, 22 bp, Artificial sequence
  Primer
tggactctgcgcagagtccacg

SEQ ID NO: 7188 - DNA, 22 bp, Artificial sequence
  Primer
ccgactctgcgcagagtcggtg

SEQ ID NO: 7189 - DNA, 22 bp, Artificial sequence
  Primer
ccgactctgcgcagagtcggag

SEQ ID NO: 7190 - DNA, 22 bp, Artificial sequence
  Primer
gggactctgcgcagagtcccgc

SEQ ID NO: 7191 - DNA, 22 bp, Artificial sequence
  Primer
gggactctgcgcagagtccctc

SEQ ID NO: 7192 - DNA, 22 bp, Artificial sequence
  Primer
gggactctgcgcagagtcccac

SEQ ID NO: 7193 - DNA, 22 bp, Artificial sequence
  Primer
  misc_feature (1)..(2): n is a, c, g, or t
  misc_feature (19)..(22): n is a, c, g, or t
nngactcgcatgcgagtcnnnn

SEQ ID NO: 7194 - DNA, 22 bp, Artificial sequence
  Primer
cggactcgcatgcgagtccgcc

SEQ ID NO: 7195 - DNA, 22 bp, Artificial sequence
  Primer
cggactcgcatgcgagtccgct

SEQ ID NO: 7196 - DNA, 22 bp, Artificial sequence
  Primer
cggactcgcatgcgagtccgtc

SEQ ID NO: 7197 - DNA, 22 bp, Artificial sequence
  Primer
aggactcgcatgcgagtcctcc

SEQ ID NO: 7198 - DNA, 22 bp, Artificial sequence
  Primer
cagactcgcatgcgagtctgcc

SEQ ID NO: 7199 - DNA, 22 bp, Artificial sequence
  Primer
cggactcgcatgcgagtccgca

SEQ ID NO: 7200 - DNA, 22 bp, Artificial sequence
  Primer
cggactcgcatgcgagtccgac

SEQ ID NO: 7201 - DNA, 22 bp, Artificial sequence
  Primer
tggactcgcatgcgagtccacc

SEQ ID NO: 7202 - DNA, 22 bp, Artificial sequence
  Primer
ctgactcgcatgcgagtcagcc

SEQ ID NO: 7203 - DNA, 22 bp, Artificial sequence
  Primer
ccgactcgcatgcgagtcgggc

SEQ ID NO: 7204 - DNA, 22 bp, Artificial sequence
  Primer
ccgactcgcatgcgagtcgggt

SEQ ID NO: 7205 - DNA, 22 bp, Artificial sequence
  Primer
ccgactcgcatgcgagtcggtc

SEQ ID NO: 7206 - DNA, 22 bp, Artificial sequence
  Primer
acgactcgcatgcgagtcgtgc

SEQ ID NO: 7207 - DNA, 22 bp, Artificial sequence
  Primer
cagactcgcatgcgagtctggc

SEQ ID NO: 7208 - DNA, 22 bp, Artificial sequence
  Primer
ccgactcgcatgcgagtcggga

SEQ ID NO: 7209 - DNA, 22 bp, Artificial sequence
  Primer
ccgactcgcatgcgagtcggac

SEQ ID NO: 7210 - DNA, 22 bp, Artificial sequence
  Primer
ctgactcgcatgcgagtcaggc

SEQ ID NO: 7211 - DNA, 22 bp, Artificial sequence
  Primer
gcgactcgcatgcgagtcgccc

SEQ ID NO: 7212 - DNA, 22 bp, Artificial sequence
  Primer
gcgactcgcatgcgagtcgcct

SEQ ID NO: 7213 - DNA, 22 bp, Artificial sequence
  Primer
gcgactcgcatgcgagtcgctc

SEQ ID NO: 7214 - DNA, 22 bp, Artificial sequence
  Primer
acgactcgcatgcgagtcgtcc

SEQ ID NO: 7215 - DNA, 22 bp, Artificial sequence
  Primer
gagactcgcatgcgagtctccc

SEQ ID NO: 7216 - DNA, 22 bp, Artificial sequence
  Primer
gcgactcgcatgcgagtcgcca

SEQ ID NO: 7217 - DNA, 22 bp, Artificial sequence
  Primer
gcgactcgcatgcgagtcgcac

SEQ ID NO: 7218 - DNA, 22 bp, Artificial sequence
  Primer
gtgactcgcatgcgagtcaccc

SEQ ID NO: 7219 - DNA, 22 bp, Artificial sequence
  Primer
gggactcgcatgcgagtcccgt

SEQ ID NO: 7220 - DNA, 22 bp, Artificial sequence
  Primer
gggactcgcatgcgagtccctg

SEQ ID NO: 7221 - DNA, 22 bp, Artificial sequence
  Primer
aggactcgcatgcgagtcctgg

SEQ ID NO: 7222 - DNA, 22 bp, Artificial sequence
  Primer
gagactcgcatgcgagtctcgg

SEQ ID NO: 7223 - DNA, 22 bp, Artificial sequence
  Primer
gggactcgcatgcgagtcccga

SEQ ID NO: 7224 - DNA, 22 bp, Artificial sequence
  Primer
gggactcgcatgcgagtcccag

SEQ ID NO: 7225 - DNA, 22 bp, Artificial sequence
  Primer
tggactcgcatgcgagtccagg

SEQ ID NO: 7226 - DNA, 22 bp, Artificial sequence
  Primer
gtgactcgcatgcgagtcacgg

SEQ ID NO: 7227 - DNA, 22 bp, Artificial sequence
  Primer
gcgactcgcatgcgagtcgccg

SEQ ID NO: 7228 - DNA, 22 bp, Artificial sequence
  Primer
gcgactcgcatgcgagtcgctg

SEQ ID NO: 7229 - DNA, 22 bp, Artificial sequence
  Primer
acgactcgcatgcgagtcgtcg

SEQ ID NO: 7230 - DNA, 22 bp, Artificial sequence
  Primer
gagactcgcatgcgagtctccg

SEQ ID NO: 7231 - DNA, 22 bp, Artificial sequence
  Primer
gcgactcgcatgcgagtcgcag

SEQ ID NO: 7232 - DNA, 22 bp, Artificial sequence
  Primer
gtgactcgcatgcgagtcaccg

SEQ ID NO: 7233 - DNA, 22 bp, Artificial sequence
  Primer
cggactcgcatgcgagtccgtg

SEQ ID NO: 7234 - DNA, 22 bp, Artificial sequence
  Primer
cagactcgcatgcgagtctggg

SEQ ID NO: 7235 - DNA, 22 bp, Artificial sequence
  Primer
cggactcgcatgcgagtccgag

SEQ ID NO: 7236 - DNA, 22 bp, Artificial sequence
  Primer
ctgactcgcatgcgagtcaggg

SEQ ID NO: 7237 - DNA, 22 bp, Artificial sequence
  Primer
acgactcgcatgcgagtcgtgg

SEQ ID NO: 7238 - DNA, 22 bp, Artificial sequence
  Primer
ccgactcgcatgcgagtcggct

SEQ ID NO: 7239 - DNA, 22 bp, Artificial sequence
  Primer
ccgactcgcatgcgagtcggca

SEQ ID NO: 7240 - DNA, 22 bp, Artificial sequence
  Primer
gagactcgcatgcgagtctcgc

SEQ ID NO: 7241 - DNA, 22 bp, Artificial sequence
  Primer
gtgactcgcatgcgagtcacgc

SEQ ID NO: 7242 - DNA, 22 bp, Artificial sequence
  Primer
aggactcgcatgcgagtcctgc

SEQ ID NO: 7243 - DNA, 22 bp, Artificial sequence
  Primer
tggactcgcatgcgagtccagc

SEQ ID NO: 7244 - DNA, 22 bp, Artificial sequence
  Primer
aggactcgcatgcgagtcctcg

SEQ ID NO: 7245 - DNA, 22 bp, Artificial sequence
  Primer
tggactcgcatgcgagtccacg

SEQ ID NO: 7246 - DNA, 22 bp, Artificial sequence
  Primer
ccgactcgcatgcgagtcggtg

SEQ ID NO: 7247 - DNA, 22 bp, Artificial sequence
  Primer
ccgactcgcatgcgagtcggag

SEQ ID NO: 7248 - DNA, 22 bp, Artificial sequence
  Primer
gggactcgcatgcgagtcccgc

SEQ ID NO: 7249 - DNA, 22 bp, Artificial sequence
  Primer
gggactcgcatgcgagtccctc

SEQ ID NO: 7250 - DNA, 22 bp, Artificial sequence
  Primer
gggactcgcatgcgagtcccac

SEQ ID NO: 7251 - DNA, 22 bp, Artificial sequence
  Primer
  misc_feature (1)..(2): n is a, c, g, or t
  misc_feature (19)..(22): n is a, c, g, or t
nngactcgctagcgagtcnnnn

SEQ ID NO: 7252 - DNA, 22 bp, Artificial sequence
  Primer
cggactcgctagcgagtccgcc

SEQ ID NO: 7253 - DNA, 22 bp, Artificial sequence
  Primer
cggactcgctagcgagtccgct

SEQ ID NO: 7254 - DNA, 22 bp, Artificial sequence
  Primer
cggactcgctagcgagtccgtc

SEQ ID NO: 7255 - DNA, 22 bp, Artificial sequence
  Primer
aggactcgctagcgagtcctcc

SEQ ID NO: 7256 - DNA, 22 bp, Artificial sequence
  Primer
cagactcgctagcgagtctgcc

SEQ ID NO: 7257 - DNA, 22 bp, Artificial sequence
  Primer
cggactcgctagcgagtccgca

SEQ ID NO: 7258 - DNA, 22 bp, Artificial sequence
  Primer
cggactcgctagcgagtccgac

SEQ ID NO: 7259 - DNA, 22 bp, Artificial sequence
  Primer
tggactcgctagcgagtccacc

SEQ ID NO: 7260 - DNA, 22 bp, Artificial sequence
  Primer
ctgactcgctagcgagtcagcc

SEQ ID NO: 7261 - DNA, 22 bp, Artificial sequence
  Primer
ccgactcgctagcgagtcgggc

SEQ ID NO: 7262 - DNA, 22 bp, Artificial sequence
  Primer
ccgactcgctagcgagtcgggt

SEQ ID NO: 7263 - DNA, 22 bp, Artificial sequence
  Primer
ccgactcgctagcgagtcggtc

SEQ ID NO: 7264 - DNA, 22 bp, Artificial sequence
  Primer
acgactcgctagcgagtcgtgc

SEQ ID NO: 7265 - DNA, 22 bp, Artificial sequence
  Primer
cagactcgctagcgagtctggc

SEQ ID NO: 7266 - DNA, 22 bp, Artificial sequence
  Primer
ccgactcgctagcgagtcggga

SEQ ID NO: 7267 - DNA, 22 bp, Artificial sequence
  Primer
ccgactcgctagcgagtcggac

SEQ ID NO: 7268 - DNA, 22 bp, Artificial sequence
  Primer
ctgactcgctagcgagtcaggc

SEQ ID NO: 7269 - DNA, 22 bp, Artificial sequence
  Primer
gcgactcgctagcgagtcgccc

SEQ ID NO: 7270 - DNA, 22 bp, Artificial sequence
  Primer
gcgactcgctagcgagtcgcct

SEQ ID NO: 7271 - DNA, 22 bp, Artificial sequence
  Primer
gcgactcgctagcgagtcgctc

SEQ ID NO: 7272 - DNA, 22 bp, Artificial sequence
  Primer
acgactcgctagcgagtcgtcc

SEQ ID NO: 7273 - DNA, 22 bp, Artificial sequence
  Primer
gagactcgctagcgagtctccc

SEQ ID NO: 7274 - DNA, 22 bp, Artificial sequence
  Primer
gcgactcgctagcgagtcgcca

SEQ ID NO: 7275 - DNA, 22 bp, Artificial sequence
  Primer
gcgactcgctagcgagtcgcac

SEQ ID NO: 7276 - DNA, 22 bp, Artificial sequence
  Primer
gtgactcgctagcgagtcaccc

SEQ ID NO: 7277 - DNA, 22 bp, Artificial sequence
  Primer
gggactcgctagcgagtcccgt

SEQ ID NO: 7278 - DNA, 22 bp, Artificial sequence
  Primer
gggactcgctagcgagtccctg

SEQ ID NO: 7279 - DNA, 22 bp, Artificial sequence
  Primer
aggactcgctagcgagtcctgg

SEQ ID NO: 7280 - DNA, 22 bp, Artificial sequence
  Primer
gagactcgctagcgagtctcgg

SEQ ID NO: 7281 - DNA, 22 bp, Artificial sequence
  Primer
gggactcgctagcgagtcccga

SEQ ID NO: 7282 - DNA, 22 bp, Artificial sequence
  Primer
gggactcgctagcgagtcccag

SEQ ID NO: 7283 - DNA, 22 bp, Artificial sequence
  Primer
tggactcgctagcgagtccagg

SEQ ID NO: 7284 - DNA, 22 bp, Artificial sequence
  Primer
gtgactcgctagcgagtcacgg

SEQ ID NO: 7285 - DNA, 22 bp, Artificial sequence
  Primer
gcgactcgctagcgagtcgccg

SEQ ID NO: 7286 - DNA, 22 bp, Artificial sequence
  Primer
gcgactcgctagcgagtcgctg

SEQ ID NO: 7287 - DNA, 22 bp, Artificial sequence
  Primer
acgactcgctagcgagtcgtcg

SEQ ID NO: 7288 - DNA, 22 bp, Artificial sequence
  Primer
gagactcgctagcgagtctccg

SEQ ID NO: 7289 - DNA, 22 bp, Artificial sequence
  Primer
gcgactcgctagcgagtcgcag

SEQ ID NO: 7290 - DNA, 22 bp, Artificial sequence
  Primer
gtgactcgctagcgagtcaccg

SEQ ID NO: 7291 - DNA, 22 bp, Artificial sequence
  Primer
cggactcgctagcgagtccgtg

SEQ ID NO: 7292 - DNA, 22 bp, Artificial sequence
  Primer
cagactcgctagcgagtctggg

SEQ ID NO: 7293 - DNA, 22 bp, Artificial sequence
  Primer
cggactcgctagcgagtccgag

SEQ ID NO: 7294 - DNA, 22 bp, Artificial sequence
  Primer
ctgactcgctagcgagtcaggg

SEQ ID NO: 7295 - DNA, 22 bp, Artificial sequence
  Primer
acgactcgctagcgagtcgtgg

SEQ ID NO: 7296 - DNA, 22 bp, Artificial sequence
  Primer
ccgactcgctagcgagtcggct

SEQ ID NO: 7297 - DNA, 22 bp, Artificial sequence
  Primer
ccgactcgctagcgagtcggca

SEQ ID NO: 7298 - DNA, 22 bp, Artificial sequence
  Primer
gagactcgctagcgagtctcgc

SEQ ID NO: 7299 - DNA, 22 bp, Artificial sequence
  Primer
gtgactcgctagcgagtcacgc

SEQ ID NO: 7300 - DNA, 22 bp, Artificial sequence
  Primer
aggactcgctagcgagtcctgc

SEQ ID NO: 7301 - DNA, 22 bp, Artificial sequence
  Primer
tggactcgctagcgagtccagc

SEQ ID NO: 7302 - DNA, 22 bp, Artificial sequence
  Primer
aggactcgctagcgagtcctcg

SEQ ID NO: 7303 - DNA, 22 bp, Artificial sequence
  Primer
tggactcgctagcgagtccacg

SEQ ID NO: 7304 - DNA, 22 bp, Artificial sequence
  Primer
ccgactcgctagcgagtcggtg

SEQ ID NO: 7305 - DNA, 22 bp, Artificial sequence
  Primer
ccgactcgctagcgagtcggag

SEQ ID NO: 7306 - DNA, 22 bp, Artificial sequence
  Primer
gggactcgctagcgagtcccgc

SEQ ID NO: 7307 - DNA, 22 bp, Artificial sequence
  Primer
gggactcgctagcgagtccctc

SEQ ID NO: 7308 - DNA, 22 bp, Artificial sequence
  Primer
gggactcgctagcgagtcccac

SEQ ID NO: 7309 - DNA, 22 bp, Artificial sequence
  Primer
  misc_feature (1)..(2): n is a, c, g, or t
  misc_feature (19)..(22): n is a, c, g, or t
nngactcgcgcgcgagtcnnnn

SEQ ID NO: 7310 - DNA, 22 bp, Artificial sequence
  Primer
cggactcgcgcgcgagtccgcc

SEQ ID NO: 7311 - DNA, 22 bp, Artificial sequence
  Primer
cggactcgcgcgcgagtccgct

SEQ ID NO: 7312 - DNA, 22 bp, Artificial sequence
  Primer
cggactcgcgcgcgagtccgtc

SEQ ID NO: 7313 - DNA, 22 bp, Artificial sequence
  Primer
aggactcgcgcgcgagtcctcc

SEQ ID NO: 7314 - DNA, 22 bp, Artificial sequence
  Primer
cagactcgcgcgcgagtctgcc

SEQ ID NO: 7315 - DNA, 22 bp, Artificial sequence
  Primer
cggactcgcgcgcgagtccgca

SEQ ID NO: 7316 - DNA, 22 bp, Artificial sequence
  Primer
cggactcgcgcgcgagtccgac

SEQ ID NO: 7317 - DNA, 22 bp, Artificial sequence
  Primer
tggactcgcgcgcgagtccacc

SEQ ID NO: 7318 - DNA, 22 bp, Artificial sequence
  Primer
ctgactcgcgcgcgagtcagcc

SEQ ID NO: 7319 - DNA, 22 bp, Artificial sequence
  Primer
ccgactcgcgcgcgagtcgggc

SEQ ID NO: 7320 - DNA, 22 bp, Artificial sequence
  Primer
ccgactcgcgcgcgagtcgggt

SEQ ID NO: 7321 - DNA, 22 bp, Artificial sequence
  Primer
ccgactcgcgcgcgagtcggtc

SEQ ID NO: 7322 - DNA, 22 bp, Artificial sequence
  Primer
acgactcgcgcgcgagtcgtgc

SEQ ID NO: 7323 - DNA, 22 bp, Artificial sequence
  Primer
cagactcgcgcgcgagtctggc

SEQ ID NO: 7324 - DNA, 22 bp, Artificial sequence
  Primer
ccgactcgcgcgcgagtcggga

SEQ ID NO: 7325 - DNA, 22 bp, Artificial sequence
  Primer
ccgactcgcgcgcgagtcggac

SEQ ID NO: 7326 - DNA, 22 bp, Artificial sequence
  Primer
ctgactcgcgcgcgagtcaggc

SEQ ID NO: 7327 - DNA, 22 bp, Artificial sequence
  Primer
gcgactcgcgcgcgagtcgccc

SEQ ID NO: 7328 - DNA, 22 bp, Artificial sequence
  Primer
gcgactcgcgcgcgagtcgcct

SEQ ID NO: 7329 - DNA, 22 bp, Artificial sequence
  Primer
gcgactcgcgcgcgagtcgctc

SEQ ID NO: 7330 - DNA, 22 bp, Artificial sequence
  Primer
acgactcgcgcgcgagtcgtcc

SEQ ID NO: 7331 - DNA, 22 bp, Artificial sequence
  Primer
gagactcgcgcgcgagtctccc

SEQ ID NO: 7332 - DNA, 22 bp, Artificial sequence
  Primer
gcgactcgcgcgcgagtcgcca

SEQ ID NO: 7333 - DNA, 22 bp, Artificial sequence
  Primer
gcgactcgcgcgcgagtcgcac

SEQ ID NO: 7334 - DNA, 22 bp, Artificial sequence
  Primer
gtgactcgcgcgcgagtcaccc

SEQ ID NO: 7335 - DNA, 22 bp, Artificial sequence
  Primer
gggactcgcgcgcgagtcccgt

SEQ ID NO: 7336 - DNA, 22 bp, Artificial sequence
  Primer
gggactcgcgcgcgagtccctg

SEQ ID NO: 7337 - DNA, 22 bp, Artificial sequence
  Primer
aggactcgcgcgcgagtcctgg

SEQ ID NO: 7338 - DNA, 22 bp, Artificial sequence
  Primer
gagactcgcgcgcgagtctcgg

SEQ ID NO: 7339 - DNA, 22 bp, Artificial sequence
  Primer
gggactcgcgcgcgagtcccga

SEQ ID NO: 7340 - DNA, 22 bp, Artificial sequence
  Primer
gggactcgcgcgcgagtcccag

SEQ ID NO: 7341 - DNA, 22 bp, Artificial sequence
  Primer
tggactcgcgcgcgagtccagg

SEQ ID NO: 7342 - DNA, 22 bp, Artificial sequence
  Primer
gtgactcgcgcgcgagtcacgg

SEQ ID NO: 7343 - DNA, 22 bp, Artificial sequence
  Primer
gcgactcgcgcgcgagtcgccg

SEQ ID NO: 7344 - DNA, 22 bp, Artificial sequence
  Primer
gcgactcgcgcgcgagtcgctg

SEQ ID NO: 7345 - DNA, 22 bp, Artificial sequence
  Primer
acgactcgcgcgcgagtcgtcg

SEQ ID NO: 7346 - DNA, 22 bp, Artificial sequence
  Primer
gagactcgcgcgcgagtctccg

SEQ ID NO: 7347 - DNA, 22 bp, Artificial sequence
  Primer
gcgactcgcgcgcgagtcgcag

SEQ ID NO: 7348 - DNA, 22 bp, Artificial sequence
  Primer
gtgactcgcgcgcgagtcaccg

SEQ ID NO: 7349 - DNA, 22 bp, Artificial sequence
  Primer
cggactcgcgcgcgagtccgtg

SEQ ID NO: 7350 - DNA, 22 bp, Artificial sequence
  Primer
cagactcgcgcgcgagtctggg

SEQ ID NO: 7351 - DNA, 22 bp, Artificial sequence
  Primer
cggactcgcgcgcgagtccgag

SEQ ID NO: 7352 - DNA, 22 bp, Artificial sequence
  Primer
ctgactcgcgcgcgagtcaggg

SEQ ID NO: 7353 - DNA, 22 bp, Artificial sequence
  Primer
acgactcgcgcgcgagtcgtgg

SEQ ID NO: 7354 - DNA, 22 bp, Artificial sequence
  Primer
ccgactcgcgcgcgagtcggct

SEQ ID NO: 7355 - DNA, 22 bp, Artificial sequence
  Primer
ccgactcgcgcgcgagtcggca

SEQ ID NO: 7356 - DNA, 22 bp, Artificial sequence
  Primer
gagactcgcgcgcgagtctcgc

SEQ ID NO: 7357 - DNA, 22 bp, Artificial sequence
  Primer
gtgactcgcgcgcgagtcacgc

SEQ ID NO: 7358 - DNA, 22 bp, Artificial sequence
  Primer
aggactcgcgcgcgagtcctgc

SEQ ID NO: 7359 - DNA, 22 bp, Artificial sequence
  Primer
tggactcgcgcgcgagtccagc

SEQ ID NO: 7360 - DNA, 22 bp, Artificial sequence
  Primer
aggactcgcgcgcgagtcctcg

SEQ ID NO: 7361 - DNA, 22 bp, Artificial sequence
  Primer
tggactcgcgcgcgagtccacg

SEQ ID NO: 7362 - DNA, 22 bp, Artificial sequence
  Primer
ccgactcgcgcgcgagtcggtg

SEQ ID NO: 7363 - DNA, 22 bp, Artificial sequence
  Primer
ccgactcgcgcgcgagtcggag

SEQ ID NO: 7364 - DNA, 22 bp, Artificial sequence
  Primer
gggactcgcgcgcgagtcccgc

SEQ ID NO: 7365 - DNA, 22 bp, Artificial sequence
  Primer
gggactcgcgcgcgagtccctc

SEQ ID NO: 7366 - DNA, 22 bp, Artificial sequence
  Primer
gggactcgcgcgcgagtcccac

SEQ ID NO: 7367 - DNA, 22 bp, Artificial sequence
  Primer
  misc_feature (1)..(2): n is a, c, g, or t
  misc_feature (19)..(22): n is a, c, g, or t
nngactcgccggcgagtcnnnn

SEQ ID NO: 7368 - DNA, 22 bp, Artificial sequence
  Primer
cggactcgccggcgagtccgcc

SEQ ID NO: 7369 - DNA, 22 bp, Artificial sequence
  Primer
cggactcgccggcgagtccgct

SEQ ID NO: 7370 - DNA, 22 bp, Artificial sequence
  Primer
cggactcgccggcgagtccgtc

SEQ ID NO: 7371 - DNA, 22 bp, Artificial sequence
  Primer
aggactcgccggcgagtcctcc

SEQ ID NO: 7372 - DNA, 22 bp, Artificial sequence
  Primer
cagactcgccggcgagtctgcc

SEQ ID NO: 7373 - DNA, 22 bp, Artificial sequence
  Primer
cggactcgccggcgagtccgca

SEQ ID NO: 7374 - DNA, 22 bp, Artificial sequence
  Primer
cggactcgccggcgagtccgac

SEQ ID NO: 7375 - DNA, 22 bp, Artificial sequence
  Primer
tggactcgccggcgagtccacc

SEQ ID NO: 7376 - DNA, 22 bp, Artificial sequence
  Primer
ctgactcgccggcgagtcagcc

SEQ ID NO: 7377 - DNA, 22 bp, Artificial sequence
  Primer
ccgactcgccggcgagtcgggc

SEQ ID NO: 7378 - DNA, 22 bp, Artificial sequence
  Primer
ccgactcgccggcgagtcgggt

SEQ ID NO: 7379 - DNA, 22 bp, Artificial sequence
  Primer
ccgactcgccggcgagtcggtc

SEQ ID NO: 7380 - DNA, 22 bp, Artificial sequence
  Primer
acgactcgccggcgagtcgtgc

SEQ ID NO: 7381 - DNA, 22 bp, Artificial sequence
  Primer
cagactcgccggcgagtctggc

SEQ ID NO: 7382 - DNA, 22 bp, Artificial sequence
  Primer
ccgactcgccggcgagtcggga

SEQ ID NO: 7383 - DNA, 22 bp, Artificial sequence
  Primer
ccgactcgccggcgagtcggac

SEQ ID NO: 7384 - DNA, 22 bp, Artificial sequence
  Primer
ctgactcgccggcgagtcaggc

SEQ ID NO: 7385 - DNA, 22 bp, Artificial sequence
  Primer
gcgactcgccggcgagtcgccc

SEQ ID NO: 7386 - DNA, 22 bp, Artificial sequence
  Primer
gcgactcgccggcgagtcgcct

SEQ ID NO: 7387 - DNA, 22 bp, Artificial sequence
  Primer
gcgactcgccggcgagtcgctc

SEQ ID NO: 7388 - DNA, 22 bp, Artificial sequence
  Primer
acgactcgccggcgagtcgtcc

SEQ ID NO: 7389 - DNA, 22 bp, Artificial sequence
  Primer
gagactcgccggcgagtctccc

SEQ ID NO: 7390 - DNA, 22 bp, Artificial sequence
  Primer
gcgactcgccggcgagtcgcca

SEQ ID NO: 7391 - DNA, 22 bp, Artificial sequence
  Primer
gcgactcgccggcgagtcgcac

SEQ ID NO: 7392 - DNA, 22 bp, Artificial sequence
  Primer
gtgactcgccggcgagtcaccc

SEQ ID NO: 7393 - DNA, 22 bp, Artificial sequence
  Primer
gggactcgccggcgagtcccgt

SEQ ID NO: 7394 - DNA, 22 bp, Artificial sequence
  Primer
gggactcgccggcgagtccctg

SEQ ID NO: 7395 - DNA, 22 bp, Artificial sequence
  Primer
aggactcgccggcgagtcctgg

SEQ ID NO: 7396 - DNA, 22 bp, Artificial sequence
  Primer
gagactcgccggcgagtctcgg

SEQ ID NO: 7397 - DNA, 22 bp, Artificial sequence
  Primer
gggactcgccggcgagtcccga

SEQ ID NO: 7398 - DNA, 22 bp, Artificial sequence
  Primer
gggactcgccggcgagtcccag

SEQ ID NO: 7399 - DNA, 22 bp, Artificial sequence
  Primer
tggactcgccggcgagtccagg

SEQ ID NO: 7400 - DNA, 22 bp, Artificial sequence
  Primer
gtgactcgccggcgagtcacgg

SEQ ID NO: 7401 - DNA, 22 bp, Artificial sequence
  Primer
gcgactcgccggcgagtcgccg

SEQ ID NO: 7402 - DNA, 22 bp, Artificial sequence
  Primer
gcgactcgccggcgagtcgctg

SEQ ID NO: 7403 - DNA, 22 bp, Artificial sequence
  Primer
acgactcgccggcgagtcgtcg

SEQ ID NO: 7404 - DNA, 22 bp, Artificial sequence
  Primer
gagactcgccggcgagtctccg

SEQ ID NO: 7405 - DNA, 22 bp, Artificial sequence
  Primer
gcgactcgccggcgagtcgcag

SEQ ID NO: 7406 - DNA, 22 bp, Artificial sequence
  Primer
gtgactcgccggcgagtcaccg

SEQ ID NO: 7407 - DNA, 22 bp, Artificial sequence
  Primer
cggactcgccggcgagtccgtg

SEQ ID NO: 7408 - DNA, 22 bp, Artificial sequence
  Primer
cagactcgccggcgagtctggg

SEQ ID NO: 7409 - DNA, 22 bp, Artificial sequence
  Primer
cggactcgccggcgagtccgag

SEQ ID NO: 7410 - DNA, 22 bp, Artificial sequence
  Primer
ctgactcgccggcgagtcaggg

SEQ ID NO: 7411 - DNA, 22 bp, Artificial sequence
  Primer
acgactcgccggcgagtcgtgg

SEQ ID NO: 7412 - DNA, 22 bp, Artificial sequence
  Primer
ccgactcgccggcgagtcggct

SEQ ID NO: 7413 - DNA, 22 bp, Artificial sequence
  Primer
ccgactcgccggcgagtcggca

SEQ ID NO: 7414 - DNA, 22 bp, Artificial sequence
  Primer
gagactcgccggcgagtctcgc

SEQ ID NO: 7415 - DNA, 22 bp, Artificial sequence
  Primer
gtgactcgccggcgagtcacgc

SEQ ID NO: 7416 - DNA, 22 bp, Artificial sequence
  Primer
aggactcgccggcgagtcctgc

SEQ ID NO: 7417 - DNA, 22 bp, Artificial sequence
  Primer
tggactcgccggcgagtccagc

SEQ ID NO: 7418 - DNA, 22 bp, Artificial sequence
  Primer
aggactcgccggcgagtcctcg

SEQ ID NO: 7419 - DNA, 22 bp, Artificial sequence
  Primer
tggactcgccggcgagtccacg

SEQ ID NO: 7420 - DNA, 22 bp, Artificial sequence
  Primer
ccgactcgccggcgagtcggtg

SEQ ID NO: 7421 - DNA, 22 bp, Artificial sequence
  Primer
ccgactcgccggcgagtcggag

SEQ ID NO: 7422 - DNA, 22 bp, Artificial sequence
  Primer
gggactcgccggcgagtcccgc

SEQ ID NO: 7423 - DNA, 22 bp, Artificial sequence
  Primer
gggactcgccggcgagtccctc

SEQ ID NO: 7424 - DNA, 22 bp, Artificial sequence
  Primer
gggactcgccggcgagtcccac

SEQ ID NO: 7425 - DNA, 22 bp, Artificial sequence
  Primer
  misc_feature (1)..(2): n is a, c, g, or t
  misc_feature (19)..(22): n is a, c, g, or t
nngactcacatgtgagtcnnnn

SEQ ID NO: 7426 - DNA, 22 bp, Artificial sequence
  Primer
cggactcacatgtgagtccgcc

SEQ ID NO: 7427 - DNA, 22 bp, Artificial sequence
  Primer
cggactcacatgtgagtccgct

SEQ ID NO: 7428 - DNA, 22 bp, Artificial sequence
  Primer
cggactcacatgtgagtccgtc

SEQ ID NO: 7429 - DNA, 22 bp, Artificial sequence
  Primer
aggactcacatgtgagtcctcc

SEQ ID NO: 7430 - DNA, 22 bp, Artificial sequence
  Primer
cagactcacatgtgagtctgcc

SEQ ID NO: 7431 - DNA, 22 bp, Artificial sequence
  Primer
cggactcacatgtgagtccgca

SEQ ID NO: 7432 - DNA, 22 bp, Artificial sequence
  Primer
cggactcacatgtgagtccgac

SEQ ID NO: 7433 - DNA, 22 bp, Artificial sequence
  Primer
tggactcacatgtgagtccacc

SEQ ID NO: 7434 - DNA, 22 bp, Artificial sequence
  Primer
ctgactcacatgtgagtcagcc

SEQ ID NO: 7435 - DNA, 22 bp, Artificial sequence
  Primer
ccgactcacatgtgagtcgggc

SEQ ID NO: 7436 - DNA, 22 bp, Artificial sequence
  Primer
ccgactcacatgtgagtcgggt

SEQ ID NO: 7437 - DNA, 22 bp, Artificial sequence
  Primer
ccgactcacatgtgagtcggtc

SEQ ID NO: 7438 - DNA, 22 bp, Artificial sequence
  Primer
acgactcacatgtgagtcgtgc

SEQ ID NO: 7439 - DNA, 22 bp, Artificial sequence
  Primer
cagactcacatgtgagtctggc

SEQ ID NO: 7440 - DNA, 22 bp, Artificial sequence
  Primer
ccgactcacatgtgagtcggga

SEQ ID NO: 7441 - DNA, 22 bp, Artificial sequence
  Primer
ccgactcacatgtgagtcggac

SEQ ID NO: 7442 - DNA, 22 bp, Artificial sequence
  Primer
ctgactcacatgtgagtcaggc

SEQ ID NO: 7443 - DNA, 22 bp, Artificial sequence
  Primer
gcgactcacatgtgagtcgccc

SEQ ID NO: 7444 - DNA, 22 bp, Artificial sequence
  Primer
gcgactcacatgtgagtcgcct

SEQ ID NO: 7445 - DNA, 22 bp, Artificial sequence
  Primer
gcgactcacatgtgagtcgctc

SEQ ID NO: 7446 - DNA, 22 bp, Artificial sequence
  Primer
acgactcacatgtgagtcgtcc

SEQ ID NO: 7447 - DNA, 22 bp, Artificial sequence
  Primer
gagactcacatgtgagtctccc

SEQ ID NO: 7448 - DNA, 22 bp, Artificial sequence
  Primer
gcgactcacatgtgagtcgcca

SEQ ID NO: 7449 - DNA, 22 bp, Artificial sequence
  Primer
gcgactcacatgtgagtcgcac

SEQ ID NO: 7450 - DNA, 22 bp, Artificial sequence
  Primer
gtgactcacatgtgagtcaccc

SEQ ID NO: 7451 - DNA, 22 bp, Artificial sequence
  Primer
gggactcacatgtgagtcccgt

SEQ ID NO: 7452 - DNA, 22 bp, Artificial sequence
  Primer
gggactcacatgtgagtccctg

SEQ ID NO: 7453 - DNA, 22 bp, Artificial sequence
  Primer
aggactcacatgtgagtcctgg

SEQ ID NO: 7454 - DNA, 22 bp, Artificial sequence
  Primer
gagactcacatgtgagtctcgg

SEQ ID NO: 7455 - DNA, 22 bp, Artificial sequence
  Primer
gggactcacatgtgagtcccga

SEQ ID NO: 7456 - DNA, 22 bp, Artificial sequence
  Primer
gggactcacatgtgagtcccag

SEQ ID NO: 7457 - DNA, 22 bp, Artificial sequence
  Primer
tggactcacatgtgagtccagg

SEQ ID NO: 7458 - DNA, 22 bp, Artificial sequence
  Primer
gtgactcacatgtgagtcacgg

SEQ ID NO: 7459 - DNA, 22 bp, Artificial sequence
  Primer
gcgactcacatgtgagtcgccg

SEQ ID NO: 7460 - DNA, 22 bp, Artificial sequence
  Primer
gcgactcacatgtgagtcgctg

SEQ ID NO: 7461 - DNA, 22 bp, Artificial sequence
  Primer
acgactcacatgtgagtcgtcg

SEQ ID NO: 7462 - DNA, 22 bp, Artificial sequence
  Primer
gagactcacatgtgagtctccg

SEQ ID NO: 7463 - DNA, 22 bp, Artificial sequence
  Primer
gcgactcacatgtgagtcgcag

SEQ ID NO: 7464 - DNA, 22 bp, Artificial sequence
  Primer
gtgactcacatgtgagtcaccg

SEQ ID NO: 7465 - DNA, 22 bp, Artificial sequence
  Primer
cggactcacatgtgagtccgtg

SEQ ID NO: 7466 - DNA, 22 bp, Artificial sequence
  Primer
cagactcacatgtgagtctggg

SEQ ID NO: 7467 - DNA, 22 bp, Artificial sequence
  Primer
cggactcacatgtgagtccgag

SEQ ID NO: 7468 - DNA, 22 bp, Artificial sequence
  Primer
ctgactcacatgtgagtcaggg

SEQ ID NO: 7469 - DNA, 22 bp, Artificial sequence
  Primer
acgactcacatgtgagtcgtgg

SEQ ID NO: 7470 - DNA, 22 bp, Artificial sequence
  Primer
ccgactcacatgtgagtcggct

SEQ ID NO: 7471 - DNA, 22 bp, Artificial sequence
  Primer
ccgactcacatgtgagtcggca

SEQ ID NO: 7472 - DNA, 22 bp, Artificial sequence
  Primer
gagactcacatgtgagtctcgc

SEQ ID NO: 7473 - DNA, 22 bp, Artificial sequence
  Primer
gtgactcacatgtgagtcacgc

SEQ ID NO: 7474 - DNA, 22 bp, Artificial sequence
  Primer
aggactcacatgtgagtcctgc

SEQ ID NO: 7475 - DNA, 22 bp, Artificial sequence
  Primer
tggactcacatgtgagtccagc

SEQ ID NO: 7476 - DNA, 22 bp, Artificial sequence
  Primer
aggactcacatgtgagtcctcg

SEQ ID NO: 7477 - DNA, 22 bp, Artificial sequence
  Primer
tggactcacatgtgagtccacg

SEQ ID NO: 7478 - DNA, 22 bp, Artificial sequence
  Primer
ccgactcacatgtgagtcggtg

SEQ ID NO: 7479 - DNA, 22 bp, Artificial sequence
  Primer
ccgactcacatgtgagtcggag

SEQ ID NO: 7480 - DNA, 22 bp, Artificial sequence
  Primer
gggactcacatgtgagtcccgc

SEQ ID NO: 7481 - DNA, 22 bp, Artificial sequence
  Primer
gggactcacatgtgagtccctc

SEQ ID NO: 7482 - DNA, 22 bp, Artificial sequence
  Primer
gggactcacatgtgagtcccac

SEQ ID NO: 7483 - DNA, 22 bp, Artificial sequence
  Primer
  misc_feature (1)..(2): n is a, c, g, or t
  misc_feature (19)..(22): n is a, c, g, or t
nngactcactagtgagtcnnnn

SEQ ID NO: 7484 - DNA, 22 bp, Artificial sequence
  Primer
cggactcactagtgagtccgcc

SEQ ID NO: 7485 - DNA, 22 bp, Artificial sequence
  Primer
cggactcactagtgagtccgct

SEQ ID NO: 7486 - DNA, 22 bp, Artificial sequence
  Primer
cggactcactagtgagtccgtc

SEQ ID NO: 7487 - DNA, 22 bp, Artificial sequence
  Primer
aggactcactagtgagtcctcc

SEQ ID NO: 7488 - DNA, 22 bp, Artificial sequence
  Primer
cagactcactagtgagtctgcc

SEQ ID NO: 7489 - DNA, 22 bp, Artificial sequence
  Primer
cggactcactagtgagtccgca

SEQ ID NO: 7490 - DNA, 22 bp, Artificial sequence
  Primer
cggactcactagtgagtccgac

SEQ ID NO: 7491 - DNA, 22 bp, Artificial sequence
  Primer
tggactcactagtgagtccacc

SEQ ID NO: 7492 - DNA, 22 bp, Artificial sequence
  Primer
ctgactcactagtgagtcagcc

SEQ ID NO: 7493 - DNA, 22 bp, Artificial sequence
  Primer
ccgactcactagtgagtcgggc

SEQ ID NO: 7494 - DNA, 22 bp, Artificial sequence
  Primer
ccgactcactagtgagtcgggt

SEQ ID NO: 7495 - DNA, 22 bp, Artificial sequence
  Primer
ccgactcactagtgagtcggtc

SEQ ID NO: 7496 - DNA, 22 bp, Artificial sequence
  Primer
acgactcactagtgagtcgtgc

SEQ ID NO: 7497 - DNA, 22 bp, Artificial sequence
  Primer
cagactcactagtgagtctggc

SEQ ID NO: 7498 - DNA, 22 bp, Artificial sequence
  Primer
ccgactcactagtgagtcggga

SEQ ID NO: 7499 - DNA, 22 bp, Artificial sequence
  Primer
ccgactcactagtgagtcggac

SEQ ID NO: 7500 - DNA, 22 bp, Artificial sequence
  Primer
ctgactcactagtgagtcaggc

SEQ ID NO: 7501 - DNA, 22 bp, Artificial sequence
  Primer
gcgactcactagtgagtcgccc

SEQ ID NO: 7502 - DNA, 22 bp, Artificial sequence
  Primer
gcgactcactagtgagtcgcct

SEQ ID NO: 7503 - DNA, 22 bp, Artificial sequence
  Primer
gcgactcactagtgagtcgctc

SEQ ID NO: 7504 - DNA, 22 bp, Artificial sequence
  Primer
acgactcactagtgagtcgtcc

SEQ ID NO: 7505 - DNA, 22 bp, Artificial sequence
  Primer
gagactcactagtgagtctccc

SEQ ID NO: 7506 - DNA, 22 bp, Artificial sequence
  Primer
gcgactcactagtgagtcgcca

SEQ ID NO: 7507 - DNA, 22 bp, Artificial sequence
  Primer
gcgactcactagtgagtcgcac

SEQ ID NO: 7508 - DNA, 22 bp, Artificial sequence
  Primer
gtgactcactagtgagtcaccc

SEQ ID NO: 7509 - DNA, 22 bp, Artificial sequence
  Primer
gggactcactagtgagtcccgt

SEQ ID NO: 7510 - DNA, 22 bp, Artificial sequence
  Primer
gggactcactagtgagtccctg

SEQ ID NO: 7511 - DNA, 22 bp, Artificial sequence
  Primer
aggactcactagtgagtcctgg

SEQ ID NO: 7512 - DNA, 22 bp, Artificial sequence
  Primer
gagactcactagtgagtctcgg

SEQ ID NO: 7513 - DNA, 22 bp, Artificial sequence
  Primer
gggactcactagtgagtcccga

SEQ ID NO: 7514 - DNA, 22 bp, Artificial sequence
  Primer
gggactcactagtgagtcccag

SEQ ID NO: 7515 - DNA, 22 bp, Artificial sequence
  Primer
tggactcactagtgagtccagg

SEQ ID NO: 7516 - DNA, 22 bp, Artificial sequence
  Primer
gtgactcactagtgagtcacgg

SEQ ID NO: 7517 - DNA, 22 bp, Artificial sequence
  Primer
gcgactcactagtgagtcgccg

SEQ ID NO: 7518 - DNA, 22 bp, Artificial sequence
  Primer
gcgactcactagtgagtcgctg

SEQ ID NO: 7519 - DNA, 22 bp, Artificial sequence
  Primer
acgactcactagtgagtcgtcg

SEQ ID NO: 7520 - DNA, 22 bp, Artificial sequence
  Primer
gagactcactagtgagtctccg

SEQ ID NO: 7521 - DNA, 22 bp, Artificial sequence
  Primer
gcgactcactagtgagtcgcag

SEQ ID NO: 7522 - DNA, 22 bp, Artificial sequence
  Primer
gtgactcactagtgagtcaccg

SEQ ID NO: 7523 - DNA, 22 bp, Artificial sequence
  Primer
cggactcactagtgagtccgtg

SEQ ID NO: 7524 - DNA, 22 bp, Artificial sequence
  Primer
cagactcactagtgagtctggg

SEQ ID NO: 7525 - DNA, 22 bp, Artificial sequence
  Primer
cggactcactagtgagtccgag

SEQ ID NO: 7526 - DNA, 22 bp, Artificial sequence
  Primer
ctgactcactagtgagtcaggg

SEQ ID NO: 7527 - DNA, 22 bp, Artificial sequence
  Primer
acgactcactagtgagtcgtgg

SEQ ID NO: 7528 - DNA, 22 bp, Artificial sequence
  Primer
ccgactcactagtgagtcggct

SEQ ID NO: 7529 - DNA, 22 bp, Artificial sequence
  Primer
ccgactcactagtgagtcggca

SEQ ID NO: 7530 - DNA, 22 bp, Artificial sequence
  Primer
gagactcactagtgagtctcgc

SEQ ID NO: 7531 - DNA, 22 bp, Artificial sequence
  Primer
gtgactcactagtgagtcacgc

SEQ ID NO: 7532 - DNA, 22 bp, Artificial sequence
  Primer
aggactcactagtgagtcctgc

SEQ ID NO: 7533 - DNA, 22 bp, Artificial sequence
  Primer
tggactcactagtgagtccagc

SEQ ID NO: 7534 - DNA, 22 bp, Artificial sequence
  Primer
aggactcactagtgagtcctcg

SEQ ID NO: 7535 - DNA, 22 bp, Artificial sequence
  Primer
tggactcactagtgagtccacg

SEQ ID NO: 7536 - DNA, 22 bp, Artificial sequence
  Primer
ccgactcactagtgagtcggtg

SEQ ID NO: 7537 - DNA, 22 bp, Artificial sequence
  Primer
ccgactcactagtgagtcggag

SEQ ID NO: 7538 - DNA, 22 bp, Artificial sequence
  Primer
gggactcactagtgagtcccgc

SEQ ID NO: 7539 - DNA, 22 bp, Artificial sequence
  Primer
gggactcactagtgagtccctc

SEQ ID NO: 7540 - DNA, 22 bp, Artificial sequence
  Primer
gggactcactagtgagtcccac

SEQ ID NO: 7541 - DNA, 22 bp, Artificial sequence
  Primer
  misc_feature (1)..(2): n is a, c, g, or t
  misc_feature (19)..(22): n is a, c, g, or t
nngactcacgcgtgagtcnnnn

SEQ ID NO: 7542 - DNA, 22 bp, Artificial sequence
  Primer
cggactcacgcgtgagtccgcc

SEQ ID NO: 7543 - DNA, 22 bp, Artificial sequence
  Primer
cggactcacgcgtgagtccgct

SEQ ID NO: 7544 - DNA, 22 bp, Artificial sequence
  Primer
cggactcacgcgtgagtccgtc

SEQ ID NO: 7545 - DNA, 22 bp, Artificial sequence
  Primer
aggactcacgcgtgagtcctcc

SEQ ID NO: 7546 - DNA, 22 bp, Artificial sequence
  Primer
cagactcacgcgtgagtctgcc

SEQ ID NO: 7547 - DNA, 22 bp, Artificial sequence
  Primer
cggactcacgcgtgagtccgca

SEQ ID NO: 7548 - DNA, 22 bp, Artificial sequence
  Primer
cggactcacgcgtgagtccgac

SEQ ID NO: 7549 - DNA, 22 bp, Artificial sequence
  Primer
tggactcacgcgtgagtccacc

SEQ ID NO: 7550 - DNA, 22 bp, Artificial sequence
  Primer
ctgactcacgcgtgagtcagcc

SEQ ID NO: 7551 - DNA, 22 bp, Artificial sequence
  Primer
ccgactcacgcgtgagtcgggc

SEQ ID NO: 7552 - DNA, 22 bp, Artificial sequence
  Primer
ccgactcacgcgtgagtcgggt

SEQ ID NO: 7553 - DNA, 22 bp, Artificial sequence
  Primer
ccgactcacgcgtgagtcggtc

SEQ ID NO: 7554 - DNA, 22 bp, Artificial sequence
  Primer
acgactcacgcgtgagtcgtgc

SEQ ID NO: 7555 - DNA, 22 bp, Artificial sequence
  Primer
cagactcacgcgtgagtctggc

SEQ ID NO: 7556 - DNA, 22 bp, Artificial sequence
  Primer
ccgactcacgcgtgagtcggga

SEQ ID NO: 7557 - DNA, 22 bp, Artificial sequence
  Primer
ccgactcacgcgtgagtcggac

SEQ ID NO: 7558 - DNA, 22 bp, Artificial sequence
  Primer
ctgactcacgcgtgagtcaggc

SEQ ID NO: 7559 - DNA, 22 bp, Artificial sequence
  Primer
gcgactcacgcgtgagtcgccc

SEQ ID NO: 7560 - DNA, 22 bp, Artificial sequence
  Primer
gcgactcacgcgtgagtcgcct

SEQ ID NO: 7561 - DNA, 22 bp, Artificial sequence
  Primer
gcgactcacgcgtgagtcgctc

SEQ ID NO: 7562 - DNA, 22 bp, Artificial sequence
  Primer
acgactcacgcgtgagtcgtcc

SEQ ID NO: 7563 - DNA, 22 bp, Artificial sequence
  Primer
gagactcacgcgtgagtctccc

SEQ ID NO: 7564 - DNA, 22 bp, Artificial sequence
  Primer
gcgactcacgcgtgagtcgcca

SEQ ID NO: 7565 - DNA, 22 bp, Artificial sequence
  Primer
gcgactcacgcgtgagtcgcac

SEQ ID NO: 7566 - DNA, 22 bp, Artificial sequence
  Primer
gtgactcacgcgtgagtcaccc

SEQ ID NO: 7567 - DNA, 22 bp, Artificial sequence
  Primer
gggactcacgcgtgagtcccgt

SEQ ID NO: 7568 - DNA, 22 bp, Artificial sequence
  Primer
gggactcacgcgtgagtccctg

SEQ ID NO: 7569 - DNA, 22 bp, Artificial sequence
  Primer
aggactcacgcgtgagtcctgg

SEQ ID NO: 7570 - DNA, 22 bp, Artificial sequence
  Primer
gagactcacgcgtgagtctcgg

SEQ ID NO: 7571 - DNA, 22 bp, Artificial sequence
  Primer
gggactcacgcgtgagtcccga

SEQ ID NO: 7572 - DNA, 22 bp, Artificial sequence
  Primer
gggactcacgcgtgagtcccag

SEQ ID NO: 7573 - DNA, 22 bp, Artificial sequence
  Primer
tggactcacgcgtgagtccagg

SEQ ID NO: 7574 - DNA, 22 bp, Artificial sequence
  Primer
gtgactcacgcgtgagtcacgg

SEQ ID NO: 7575 - DNA, 22 bp, Artificial sequence
  Primer
gcgactcacgcgtgagtcgccg

SEQ ID NO: 7576 - DNA, 22 bp, Artificial sequence
  Primer
gcgactcacgcgtgagtcgctg

SEQ ID NO: 7577 - DNA, 22 bp, Artificial sequence
  Primer
acgactcacgcgtgagtcgtcg

SEQ ID NO: 7578 - DNA, 22 bp, Artificial sequence
  Primer
gagactcacgcgtgagtctccg

SEQ ID NO: 7579 - DNA, 22 bp, Artificial sequence
  Primer
gcgactcacgcgtgagtcgcag

SEQ ID NO: 7580 - DNA, 22 bp, Artificial sequence
  Primer
gtgactcacgcgtgagtcaccg

SEQ ID NO: 7581 - DNA, 22 bp, Artificial sequence
  Primer
cggactcacgcgtgagtccgtg

SEQ ID NO: 7582 - DNA, 22 bp, Artificial sequence
  Primer
cagactcacgcgtgagtctggg

SEQ ID NO: 7583 - DNA, 22 bp, Artificial sequence
  Primer
cggactcacgcgtgagtccgag

SEQ ID NO: 7584 - DNA, 22 bp, Artificial sequence
  Primer
ctgactcacgcgtgagtcaggg

SEQ ID NO: 7585 - DNA, 22 bp, Artificial sequence
  Primer
acgactcacgcgtgagtcgtgg

SEQ ID NO: 7586 - DNA, 22 bp, Artificial sequence
  Primer
ccgactcacgcgtgagtcggct

SEQ ID NO: 7587 - DNA, 22 bp, Artificial sequence
  Primer
ccgactcacgcgtgagtcggca

SEQ ID NO: 7588 - DNA, 22 bp, Artificial sequence
  Primer
gagactcacgcgtgagtctcgc

SEQ ID NO: 7589 - DNA, 22 bp, Artificial sequence
  Primer
gtgactcacgcgtgagtcacgc

SEQ ID NO: 7590 - DNA, 22 bp, Artificial sequence
  Primer
aggactcacgcgtgagtcctgc

SEQ ID NO: 7591 - DNA, 22 bp, Artificial sequence
  Primer
tggactcacgcgtgagtccagc

SEQ ID NO: 7592 - DNA, 22 bp, Artificial sequence
  Primer
aggactcacgcgtgagtcctcg

SEQ ID NO: 7593 - DNA, 22 bp, Artificial sequence
  Primer
tggactcacgcgtgagtccacg

SEQ ID NO: 7594 - DNA, 22 bp, Artificial sequence
  Primer
ccgactcacgcgtgagtcggtg

SEQ ID NO: 7595 - DNA, 22 bp, Artificial sequence
  Primer
ccgactcacgcgtgagtcggag

SEQ ID NO: 7596 - DNA, 22 bp, Artificial sequence
  Primer
gggactcacgcgtgagtcccgc

SEQ ID NO: 7597 - DNA, 22 bp, Artificial sequence
  Primer
gggactcacgcgtgagtccctc

SEQ ID NO: 7598 - DNA, 22 bp, Artificial sequence
  Primer
gggactcacgcgtgagtcccac

SEQ ID NO: 7599 - DNA, 22 bp, Artificial sequence
  Primer
  misc_feature (1)..(2): n is a, c, g, or t
  misc_feature (19)..(22): n is a, c, g, or t
nngactcaccggtgagtcnnnn

SEQ ID NO: 7600 - DNA, 22 bp, Artificial sequence
  Primer
cggactcaccggtgagtccgcc

SEQ ID NO: 7601 - DNA, 22 bp, Artificial sequence
  Primer
cggactcaccggtgagtccgct

SEQ ID NO: 7602 - DNA, 22 bp, Artificial sequence
  Primer
cggactcaccggtgagtccgtc

SEQ ID NO: 7603 - DNA, 22 bp, Artificial sequence
  Primer
aggactcaccggtgagtcctcc

SEQ ID NO: 7604 - DNA, 22 bp, Artificial sequence
  Primer
cagactcaccggtgagtctgcc

SEQ ID NO: 7605 - DNA, 22 bp, Artificial sequence
  Primer
cggactcaccggtgagtccgca

SEQ ID NO: 7606 - DNA, 22 bp, Artificial sequence
  Primer
cggactcaccggtgagtccgac

SEQ ID NO: 7607 - DNA, 22 bp, Artificial sequence
  Primer
tggactcaccggtgagtccacc

SEQ ID NO: 7608 - DNA, 22 bp, Artificial sequence
  Primer
ctgactcaccggtgagtcagcc

SEQ ID NO: 7609 - DNA, 22 bp, Artificial sequence
  Primer
ccgactcaccggtgagtcgggc

SEQ ID NO: 7610 - DNA, 22 bp, Artificial sequence
  Primer
ccgactcaccggtgagtcgggt

SEQ ID NO: 7611 - DNA, 22 bp, Artificial sequence
  Primer
ccgactcaccggtgagtcggtc

SEQ ID NO: 7612 - DNA, 22 bp, Artificial sequence
  Primer
acgactcaccggtgagtcgtgc

SEQ ID NO: 7613 - DNA, 22 bp, Artificial sequence
  Primer
cagactcaccggtgagtctggc

SEQ ID NO: 7614 - DNA, 22 bp, Artificial sequence
  Primer
ccgactcaccggtgagtcggga

SEQ ID NO: 7615 - DNA, 22 bp, Artificial sequence
  Primer
ccgactcaccggtgagtcggac

SEQ ID NO: 7616 - DNA, 22 bp, Artificial sequence
  Primer
ctgactcaccggtgagtcaggc

SEQ ID NO: 7617 - DNA, 22 bp, Artificial sequence
  Primer
gcgactcaccggtgagtcgccc

SEQ ID NO: 7618 - DNA, 22 bp, Artificial sequence
  Primer
gcgactcaccggtgagtcgcct

SEQ ID NO: 7619 - DNA, 22 bp, Artificial sequence
  Primer
gcgactcaccggtgagtcgctc

SEQ ID NO: 7620 - DNA, 22 bp, Artificial sequence
  Primer
acgactcaccggtgagtcgtcc

SEQ ID NO: 7621 - DNA, 22 bp, Artificial sequence
  Primer
gagactcaccggtgagtctccc

SEQ ID NO: 7622 - DNA, 22 bp, Artificial sequence
  Primer
gcgactcaccggtgagtcgcca

SEQ ID NO: 7623 - DNA, 22 bp, Artificial sequence
  Primer
gcgactcaccggtgagtcgcac

SEQ ID NO: 7624 - DNA, 22 bp, Artificial sequence
  Primer
gtgactcaccggtgagtcaccc

SEQ ID NO: 7625 - DNA, 22 bp, Artificial sequence
  Primer
gggactcaccggtgagtcccgt

SEQ ID NO: 7626 - DNA, 22 bp, Artificial sequence
  Primer
gggactcaccggtgagtccctg

SEQ ID NO: 7627 - DNA, 22 bp, Artificial sequence
  Primer
aggactcaccggtgagtcctgg

SEQ ID NO: 7628 - DNA, 22 bp, Artificial sequence
  Primer
gagactcaccggtgagtctcgg

SEQ ID NO: 7629 - DNA, 22 bp, Artificial sequence
  Primer
gggactcaccggtgagtcccga

SEQ ID NO: 7630 - DNA, 22 bp, Artificial sequence
  Primer
gggactcaccggtgagtcccag

SEQ ID NO: 7631 - DNA, 22 bp, Artificial sequence
  Primer
tggactcaccggtgagtccagg

SEQ ID NO: 7632 - DNA, 22 bp, Artificial sequence
  Primer
gtgactcaccggtgagtcacgg

SEQ ID NO: 7633 - DNA, 22 bp, Artificial sequence
  Primer
gcgactcaccggtgagtcgccg

SEQ ID NO: 7634 - DNA, 22 bp, Artificial sequence
  Primer
gcgactcaccggtgagtcgctg

SEQ ID NO: 7635 - DNA, 22 bp, Artificial sequence
  Primer
acgactcaccggtgagtcgtcg

SEQ ID NO: 7636 - DNA, 22 bp, Artificial sequence
  Primer
gagactcaccggtgagtctccg

SEQ ID NO: 7637 - DNA, 22 bp, Artificial sequence
  Primer
gcgactcaccggtgagtcgcag

SEQ ID NO: 7638 - DNA, 22 bp, Artificial sequence
  Primer
gtgactcaccggtgagtcaccg

SEQ ID NO: 7639 - DNA, 22 bp, Artificial sequence
  Primer
cggactcaccggtgagtccgtg

SEQ ID NO: 7640 - DNA, 22 bp, Artificial sequence
  Primer
cagactcaccggtgagtctggg

SEQ ID NO: 7641 - DNA, 22 bp, Artificial sequence
  Primer
cggactcaccggtgagtccgag

SEQ ID NO: 7642 - DNA, 22 bp, Artificial sequence
  Primer
ctgactcaccggtgagtcaggg

SEQ ID NO: 7643 - DNA, 22 bp, Artificial sequence
  Primer
acgactcaccggtgagtcgtgg

SEQ ID NO: 7644 - DNA, 22 bp, Artificial sequence
  Primer
ccgactcaccggtgagtcggct

SEQ ID NO: 7645 - DNA, 22 bp, Artificial sequence
  Primer
ccgactcaccggtgagtcggca

SEQ ID NO: 7646 - DNA, 22 bp, Artificial sequence
  Primer
gagactcaccggtgagtctcgc

SEQ ID NO: 7647 - DNA, 22 bp, Artificial sequence
  Primer
gtgactcaccggtgagtcacgc

SEQ ID NO: 7648 - DNA, 22 bp, Artificial sequence
  Primer
aggactcaccggtgagtcctgc

SEQ ID NO: 7649 - DNA, 22 bp, Artificial sequence
  Primer
tggactcaccggtgagtccagc

SEQ ID NO: 7650 - DNA, 22 bp, Artificial sequence
  Primer
aggactcaccggtgagtcctcg

SEQ ID NO: 7651 - DNA, 22 bp, Artificial sequence
  Primer
tggactcaccggtgagtccacg

SEQ ID NO: 7652 - DNA, 22 bp, Artificial sequence
  Primer
ccgactcaccggtgagtcggtg

SEQ ID NO: 7653 - DNA, 22 bp, Artificial sequence
  Primer
ccgactcaccggtgagtcggag

SEQ ID NO: 7654 - DNA, 22 bp, Artificial sequence
  Primer
gggactcaccggtgagtcccgc

SEQ ID NO: 7655 - DNA, 22 bp, Artificial sequence
  Primer
gggactcaccggtgagtccctc

SEQ ID NO: 7656 - DNA, 22 bp, Artificial sequence
  Primer
gggactcaccggtgagtcccac

SEQ ID NO: 7657 - DNA, 22 bp, Artificial sequence
  Primer
  misc_feature (1)..(2): n is a, c, g, or t
  misc_feature (19)..(22): n is a, c, g, or t
nngactcggatccgagtcnnnn

SEQ ID NO: 7658 - DNA, 22 bp, Artificial sequence
  Primer
cggactcggatccgagtccgcc

SEQ ID NO: 7659 - DNA, 22 bp, Artificial sequence
  Primer
cggactcggatccgagtccgct

SEQ ID NO: 7660 - DNA, 22 bp, Artificial sequence
  Primer
cggactcggatccgagtccgtc

SEQ ID NO: 7661 - DNA, 22 bp, Artificial sequence
  Primer
aggactcggatccgagtcctcc

SEQ ID NO: 7662 - DNA, 22 bp, Artificial sequence
  Primer
cagactcggatccgagtctgcc

SEQ ID NO: 7663 - DNA, 22 bp, Artificial sequence
  Primer
cggactcggatccgagtccgca

SEQ ID NO: 7664 - DNA, 22 bp, Artificial sequence
  Primer
cggactcggatccgagtccgac

SEQ ID NO: 7665 - DNA, 22 bp, Artificial sequence
  Primer
tggactcggatccgagtccacc

SEQ ID NO: 7666 - DNA, 22 bp, Artificial sequence
  Primer
ctgactcggatccgagtcagcc

SEQ ID NO: 7667 - DNA, 22 bp, Artificial sequence
  Primer
ccgactcggatccgagtcgggc

SEQ ID NO: 7668 - DNA, 22 bp, Artificial sequence
  Primer
ccgactcggatccgagtcgggt

SEQ ID NO: 7669 - DNA, 22 bp, Artificial sequence
  Primer
ccgactcggatccgagtcggtc

SEQ ID NO: 7670 - DNA, 22 bp, Artificial sequence
  Primer
acgactcggatccgagtcgtgc

SEQ ID NO: 7671 - DNA, 22 bp, Artificial sequence
  Primer
cagactcggatccgagtctggc

SEQ ID NO: 7672 - DNA, 22 bp, Artificial sequence
  Primer
ccgactcggatccgagtcggga

SEQ ID NO: 7673 - DNA, 22 bp, Artificial sequence
  Primer
ccgactcggatccgagtcggac

SEQ ID NO: 7674 - DNA, 22 bp, Artificial sequence
  Primer
ctgactcggatccgagtcaggc

SEQ ID NO: 7675 - DNA, 22 bp, Artificial sequence
  Primer
gcgactcggatccgagtcgccc

SEQ ID NO: 7676 - DNA, 22 bp, Artificial sequence
  Primer
gcgactcggatccgagtcgcct

SEQ ID NO: 7677 - DNA, 22 bp, Artificial sequence
  Primer
gcgactcggatccgagtcgctc

SEQ ID NO: 7678 - DNA, 22 bp, Artificial sequence
  Primer
acgactcggatccgagtcgtcc

SEQ ID NO: 7679 - DNA, 22 bp, Artificial sequence
  Primer
gagactcggatccgagtctccc

SEQ ID NO: 7680 - DNA, 22 bp, Artificial sequence
  Primer
gcgactcggatccgagtcgcca

SEQ ID NO: 7681 - DNA, 22 bp, Artificial sequence
  Primer
gcgactcggatccgagtcgcac

SEQ ID NO: 7682 - DNA, 22 bp, Artificial sequence
  Primer
gtgactcggatccgagtcaccc

SEQ ID NO: 7683 - DNA, 22 bp, Artificial sequence
  Primer
gggactcggatccgagtcccgt

SEQ ID NO: 7684 - DNA, 22 bp, Artificial sequence
  Primer
gggactcggatccgagtccctg

SEQ ID NO: 7685 - DNA, 22 bp, Artificial sequence
  Primer
aggactcggatccgagtcctgg

SEQ ID NO: 7686 - DNA, 22 bp, Artificial sequence
  Primer
gagactcggatccgagtctcgg

SEQ ID NO: 7687 - DNA, 22 bp, Artificial sequence
  Primer
gggactcggatccgagtcccga

SEQ ID NO: 7688 - DNA, 22 bp, Artificial sequence
  Primer
gggactcggatccgagtcccag

SEQ ID NO: 7689 - DNA, 22 bp, Artificial sequence
  Primer
tggactcggatccgagtccagg

SEQ ID NO: 7690 - DNA, 22 bp, Artificial sequence
  Primer
gtgactcggatccgagtcacgg

SEQ ID NO: 7691 - DNA, 22 bp, Artificial sequence
  Primer
gcgactcggatccgagtcgccg

SEQ ID NO: 7692 - DNA, 22 bp, Artificial sequence
  Primer
gcgactcggatccgagtcgctg

SEQ ID NO: 7693 - DNA, 22 bp, Artificial sequence
  Primer
acgactcggatccgagtcgtcg

SEQ ID NO: 7694 - DNA, 22 bp, Artificial sequence
  Primer
gagactcggatccgagtctccg

SEQ ID NO: 7695 - DNA, 22 bp, Artificial sequence
  Primer
gcgactcggatccgagtcgcag

SEQ ID NO: 7696 - DNA, 22 bp, Artificial sequence
  Primer
gtgactcggatccgagtcaccg

SEQ ID NO: 7697 - DNA, 22 bp, Artificial sequence
  Primer
cggactcggatccgagtccgtg

SEQ ID NO: 7698 - DNA, 22 bp, Artificial sequence
  Primer
cagactcggatccgagtctggg

SEQ ID NO: 7699 - DNA, 22 bp, Artificial sequence
  Primer
cggactcggatccgagtccgag

SEQ ID NO: 7700 - DNA, 22 bp, Artificial sequence
  Primer
ctgactcggatccgagtcaggg

SEQ ID NO: 7701 - DNA, 22 bp, Artificial sequence
  Primer
acgactcggatccgagtcgtgg

SEQ ID NO: 7702 - DNA, 22 bp, Artificial sequence
  Primer
ccgactcggatccgagtcggct

SEQ ID NO: 7703 - DNA, 22 bp, Artificial sequence
  Primer
ccgactcggatccgagtcggca

SEQ ID NO: 7704 - DNA, 22 bp, Artificial sequence
  Primer
gagactcggatccgagtctcgc

SEQ ID NO: 7705 - DNA, 22 bp, Artificial sequence
  Primer
gtgactcggatccgagtcacgc

SEQ ID NO: 7706 - DNA, 22 bp, Artificial sequence
  Primer
aggactcggatccgagtcctgc

SEQ ID NO: 7707 - DNA, 22 bp, Artificial sequence
  Primer
tggactcggatccgagtccagc

SEQ ID NO: 7708 - DNA, 22 bp, Artificial sequence
  Primer
aggactcggatccgagtcctcg

SEQ ID NO: 7709 - DNA, 22 bp, Artificial sequence
  Primer
tggactcggatccgagtccacg

SEQ ID NO: 7710 - DNA, 22 bp, Artificial sequence
  Primer
ccgactcggatccgagtcggtg

SEQ ID NO: 7711 - DNA, 22 bp, Artificial sequence
  Primer
ccgactcggatccgagtcggag

SEQ ID NO: 7712 - DNA, 22 bp, Artificial sequence
  Primer
gggactcggatccgagtcccgc

SEQ ID NO: 7713 - DNA, 22 bp, Artificial sequence
  Primer
gggactcggatccgagtccctc

SEQ ID NO: 7714 - DNA, 22 bp, Artificial sequence
  Primer
gggactcggatccgagtcccac

SEQ ID NO: 7715 - DNA, 22 bp, Artificial sequence
  Primer
  misc_feature (1)..(2): n is a, c, g, or t
  misc_feature (19)..(22): n is a, c, g, or t
nngactcggtaccgagtcnnnn

SEQ ID NO: 7716 - DNA, 22 bp, Artificial sequence
  Primer
cggactcggtaccgagtccgcc

SEQ ID NO: 7717 - DNA, 22 bp, Artificial sequence
  Primer
cggactcggtaccgagtccgct

SEQ ID NO: 7718 - DNA, 22 bp, Artificial sequence
  Primer
cggactcggtaccgagtccgtc

SEQ ID NO: 7719 - DNA, 22 bp, Artificial sequence
  Primer
aggactcggtaccgagtcctcc

SEQ ID NO: 7720 - DNA, 22 bp, Artificial sequence
  Primer
cagactcggtaccgagtctgcc

SEQ ID NO: 7721 - DNA, 22 bp, Artificial sequence
  Primer
cggactcggtaccgagtccgca

SEQ ID NO: 7722 - DNA, 22 bp, Artificial sequence
  Primer
cggactcggtaccgagtccgac

SEQ ID NO: 7723 - DNA, 22 bp, Artificial sequence
  Primer
tggactcggtaccgagtccacc

SEQ ID NO: 7724 - DNA, 22 bp, Artificial sequence
  Primer
ctgactcggtaccgagtcagcc

SEQ ID NO: 7725 - DNA, 22 bp, Artificial sequence
  Primer
ccgactcggtaccgagtcgggc

SEQ ID NO: 7726 - DNA, 22 bp, Artificial sequence
  Primer
ccgactcggtaccgagtcgggt

SEQ ID NO: 7727 - DNA, 22 bp, Artificial sequence
  Primer
ccgactcggtaccgagtcggtc

SEQ ID NO: 7728 - DNA, 22 bp, Artificial sequence
  Primer
acgactcggtaccgagtcgtgc

SEQ ID NO: 7729 - DNA, 22 bp, Artificial sequence
  Primer
cagactcggtaccgagtctggc

SEQ ID NO: 7730 - DNA, 22 bp, Artificial sequence
  Primer
ccgactcggtaccgagtcggga

SEQ ID NO: 7731 - DNA, 22 bp, Artificial sequence
  Primer
ccgactcggtaccgagtcggac

SEQ ID NO: 7732 - DNA, 22 bp, Artificial sequence
  Primer
ctgactcggtaccgagtcaggc

SEQ ID NO: 7733 - DNA, 22 bp, Artificial sequence
  Primer
gcgactcggtaccgagtcgccc

SEQ ID NO: 7734 - DNA, 22 bp, Artificial sequence
  Primer
gcgactcggtaccgagtcgcct

SEQ ID NO: 7735 - DNA, 22 bp, Artificial sequence
  Primer
gcgactcggtaccgagtcgctc

SEQ ID NO: 7736 - DNA, 22 bp, Artificial sequence
  Primer
acgactcggtaccgagtcgtcc

SEQ ID NO: 7737 - DNA, 22 bp, Artificial sequence
  Primer
gagactcggtaccgagtctccc

SEQ ID NO: 7738 - DNA, 22 bp, Artificial sequence
  Primer
gcgactcggtaccgagtcgcca

SEQ ID NO: 7739 - DNA, 22 bp, Artificial sequence
  Primer
gcgactcggtaccgagtcgcac

SEQ ID NO: 7740 - DNA, 22 bp, Artificial sequence
  Primer
gtgactcggtaccgagtcaccc

SEQ ID NO: 7741 - DNA, 22 bp, Artificial sequence
  Primer
gggactcggtaccgagtcccgt

SEQ ID NO: 7742 - DNA, 22 bp, Artificial sequence
  Primer
gggactcggtaccgagtccctg

SEQ ID NO: 7743 - DNA, 22 bp, Artificial sequence
  Primer
aggactcggtaccgagtcctgg

SEQ ID NO: 7744 - DNA, 22 bp, Artificial sequence
  Primer
gagactcggtaccgagtctcgg

SEQ ID NO: 7745 - DNA, 22 bp, Artificial sequence
  Primer
gggactcggtaccgagtcccga

SEQ ID NO: 7746 - DNA, 22 bp, Artificial sequence
  Primer
gggactcggtaccgagtcccag

SEQ ID NO: 7747 - DNA, 22 bp, Artificial sequence
  Primer
tggactcggtaccgagtccagg

SEQ ID NO: 7748 - DNA, 22 bp, Artificial sequence
  Primer
gtgactcggtaccgagtcacgg

SEQ ID NO: 7749 - DNA, 22 bp, Artificial sequence
  Primer
gcgactcggtaccgagtcgccg

SEQ ID NO: 7750 - DNA, 22 bp, Artificial sequence
  Primer
gcgactcggtaccgagtcgctg

SEQ ID NO: 7751 - DNA, 22 bp, Artificial sequence
  Primer
acgactcggtaccgagtcgtcg

SEQ ID NO: 7752 - DNA, 22 bp, Artificial sequence
  Primer
gagactcggtaccgagtctccg

SEQ ID NO: 7753 - DNA, 22 bp, Artificial sequence
  Primer
gcgactcggtaccgagtcgcag

SEQ ID NO: 7754 - DNA, 22 bp, Artificial sequence
  Primer
gtgactcggtaccgagtcaccg

SEQ ID NO: 7755 - DNA, 22 bp, Artificial sequence
  Primer
cggactcggtaccgagtccgtg

SEQ ID NO: 7756 - DNA, 22 bp, Artificial sequence
  Primer
cagactcggtaccgagtctggg

SEQ ID NO: 7757 - DNA, 22 bp, Artificial sequence
  Primer
cggactcggtaccgagtccgag

SEQ ID NO: 7758 - DNA, 22 bp, Artificial sequence
  Primer
ctgactcggtaccgagtcaggg

SEQ ID NO: 7759 - DNA, 22 bp, Artificial sequence
  Primer
acgactcggtaccgagtcgtgg

SEQ ID NO: 7760 - DNA, 22 bp, Artificial sequence
  Primer
ccgactcggtaccgagtcggct

SEQ ID NO: 7761 - DNA, 22 bp, Artificial sequence
  Primer
ccgactcggtaccgagtcggca

SEQ ID NO: 7762 - DNA, 22 bp, Artificial sequence
  Primer
gagactcggtaccgagtctcgc

SEQ ID NO: 7763 - DNA, 22 bp, Artificial sequence
  Primer
gtgactcggtaccgagtcacgc

SEQ ID NO: 7764 - DNA, 22 bp, Artificial sequence
  Primer
aggactcggtaccgagtcctgc

SEQ ID NO: 7765 - DNA, 22 bp, Artificial sequence
  Primer
tggactcggtaccgagtccagc

SEQ ID NO: 7766 - DNA, 22 bp, Artificial sequence
  Primer
aggactcggtaccgagtcctcg

SEQ ID NO: 7767 - DNA, 22 bp, Artificial sequence
  Primer
tggactcggtaccgagtccacg

SEQ ID NO: 7768 - DNA, 22 bp, Artificial sequence
  Primer
ccgactcggtaccgagtcggtg

SEQ ID NO: 7769 - DNA, 22 bp, Artificial sequence
  Primer
ccgactcggtaccgagtcggag

SEQ ID NO: 7770 - DNA, 22 bp, Artificial sequence
  Primer
gggactcggtaccgagtcccgc

SEQ ID NO: 7771 - DNA, 22 bp, Artificial sequence
  Primer
gggactcggtaccgagtccctc

SEQ ID NO: 7772 - DNA, 22 bp, Artificial sequence
  Primer
gggactcggtaccgagtcccac

SEQ ID NO: 7773 - DNA, 22 bp, Artificial sequence
  Primer
  misc_feature (1)..(2): n is a, c, g, or t
  misc_feature (19)..(22): n is a, c, g, or t
nngactcgggcccgagtcnnnn

SEQ ID NO: 7774 - DNA, 22 bp, Artificial sequence
  Primer
cggactcgggcccgagtccgcc

SEQ ID NO: 7775 - DNA, 22 bp, Artificial sequence
  Primer
cggactcgggcccgagtccgct

SEQ ID NO: 7776 - DNA, 22 bp, Artificial sequence
  Primer
cggactcgggcccgagtccgtc

SEQ ID NO: 7777 - DNA, 22 bp, Artificial sequence
  Primer
aggactcgggcccgagtcctcc

SEQ ID NO: 7778 - DNA, 22 bp, Artificial sequence
  Primer
cagactcgggcccgagtctgcc

SEQ ID NO: 7779 - DNA, 22 bp, Artificial sequence
  Primer
cggactcgggcccgagtccgca

SEQ ID NO: 7780 - DNA, 22 bp, Artificial sequence
  Primer
cggactcgggcccgagtccgac

SEQ ID NO: 7781 - DNA, 22 bp, Artificial sequence
  Primer
tggactcgggcccgagtccacc

SEQ ID NO: 7782 - DNA, 22 bp, Artificial sequence
  Primer
ctgactcgggcccgagtcagcc

SEQ ID NO: 7783 - DNA, 22 bp, Artificial sequence
  Primer
ccgactcgggcccgagtcgggc

SEQ ID NO: 7784 - DNA, 22 bp, Artificial sequence
  Primer
ccgactcgggcccgagtcgggt

SEQ ID NO: 7785 - DNA, 22 bp, Artificial sequence
  Primer
ccgactcgggcccgagtcggtc

SEQ ID NO: 7786 - DNA, 22 bp, Artificial sequence
  Primer
acgactcgggcccgagtcgtgc

SEQ ID NO: 7787 - DNA, 22 bp, Artificial sequence
  Primer
cagactcgggcccgagtctggc

SEQ ID NO: 7788 - DNA, 22 bp, Artificial sequence
  Primer
ccgactcgggcccgagtcggga

SEQ ID NO: 7789 - DNA, 22 bp, Artificial sequence
  Primer
ccgactcgggcccgagtcggac

SEQ ID NO: 7790 - DNA, 22 bp, Artificial sequence
  Primer
ctgactcgggcccgagtcaggc

SEQ ID NO: 7791 - DNA, 22 bp, Artificial sequence
  Primer
gcgactcgggcccgagtcgccc

SEQ ID NO: 7792 - DNA, 22 bp, Artificial sequence
  Primer
gcgactcgggcccgagtcgcct

SEQ ID NO: 7793 - DNA, 22 bp, Artificial sequence
  Primer
gcgactcgggcccgagtcgctc

SEQ ID NO: 7794 - DNA, 22 bp, Artificial sequence
  Primer
acgactcgggcccgagtcgtcc

SEQ ID NO: 7795 - DNA, 22 bp, Artificial sequence
  Primer
gagactcgggcccgagtctccc

SEQ ID NO: 7796 - DNA, 22 bp, Artificial sequence
  Primer
gcgactcgggcccgagtcgcca

SEQ ID NO: 7797 - DNA, 22 bp, Artificial sequence
  Primer
gcgactcgggcccgagtcgcac

SEQ ID NO: 7798 - DNA, 22 bp, Artificial sequence
  Primer
gtgactcgggcccgagtcaccc

SEQ ID NO: 7799 - DNA, 22 bp, Artificial sequence
  Primer
gggactcgggcccgagtcccgt

SEQ ID NO: 7800 - DNA, 22 bp, Artificial sequence
  Primer
gggactcgggcccgagtccctg

SEQ ID NO: 7801 - DNA, 22 bp, Artificial sequence
  Primer
aggactcgggcccgagtcctgg

SEQ ID NO: 7802 - DNA, 22 bp, Artificial sequence
  Primer
gagactcgggcccgagtctcgg

SEQ ID NO: 7803 - DNA, 22 bp, Artificial sequence
  Primer
gggactcgggcccgagtcccga

SEQ ID NO: 7804 - DNA, 22 bp, Artificial sequence
  Primer
gggactcgggcccgagtcccag

SEQ ID NO: 7805 - DNA, 22 bp, Artificial sequence
  Primer
tggactcgggcccgagtccagg

SEQ ID NO: 7806 - DNA, 22 bp, Artificial sequence
  Primer
gtgactcgggcccgagtcacgg

SEQ ID NO: 7807 - DNA, 22 bp, Artificial sequence
  Primer
gcgactcgggcccgagtcgccg

SEQ ID NO: 7808 - DNA, 22 bp, Artificial sequence
  Primer
gcgactcgggcccgagtcgctg

SEQ ID NO: 7809 - DNA, 22 bp, Artificial sequence
  Primer
acgactcgggcccgagtcgtcg

SEQ ID NO: 7810 - DNA, 22 bp, Artificial sequence
  Primer
gagactcgggcccgagtctccg

SEQ ID NO: 7811 - DNA, 22 bp, Artificial sequence
  Primer
gcgactcgggcccgagtcgcag

SEQ ID NO: 7812 - DNA, 22 bp, Artificial sequence
  Primer
gtgactcgggcccgagtcaccg

SEQ ID NO: 7813 - DNA, 22 bp, Artificial sequence
  Primer
cggactcgggcccgagtccgtg

SEQ ID NO: 7814 - DNA, 22 bp, Artificial sequence
  Primer
cagactcgggcccgagtctggg

SEQ ID NO: 7815 - DNA, 22 bp, Artificial sequence
  Primer
cggactcgggcccgagtccgag

SEQ ID NO: 7816 - DNA, 22 bp, Artificial sequence
  Primer
ctgactcgggcccgagtcaggg

SEQ ID NO: 7817 - DNA, 22 bp, Artificial sequence
  Primer
acgactcgggcccgagtcgtgg

SEQ ID NO: 7818 - DNA, 22 bp, Artificial sequence
  Primer
ccgactcgggcccgagtcggct

SEQ ID NO: 7819 - DNA, 22 bp, Artificial sequence
  Primer
ccgactcgggcccgagtcggca

SEQ ID NO: 7820 - DNA, 22 bp, Artificial sequence
  Primer
gagactcgggcccgagtctcgc

SEQ ID NO: 7821 - DNA, 22 bp, Artificial sequence
  Primer
gtgactcgggcccgagtcacgc

SEQ ID NO: 7822 - DNA, 22 bp, Artificial sequence
  Primer
aggactcgggcccgagtcctgc

SEQ ID NO: 7823 - DNA, 22 bp, Artificial sequence
  Primer
tggactcgggcccgagtccagc

SEQ ID NO: 7824 - DNA, 22 bp, Artificial sequence
  Primer
aggactcgggcccgagtcctcg

SEQ ID NO: 7825 - DNA, 22 bp, Artificial sequence
  Primer
tggactcgggcccgagtccacg

SEQ ID NO: 7826 - DNA, 22 bp, Artificial sequence
  Primer
ccgactcgggcccgagtcggtg

SEQ ID NO: 7827 - DNA, 22 bp, Artificial sequence
  Primer
ccgactcgggcccgagtcggag

SEQ ID NO: 7828 - DNA, 22 bp, Artificial sequence
  Primer
gggactcgggcccgagtcccgc

SEQ ID NO: 7829 - DNA, 22 bp, Artificial sequence
  Primer
gggactcgggcccgagtccctc

SEQ ID NO: 7830 - DNA, 22 bp, Artificial sequence
  Primer
gggactcgggcccgagtcccac

SEQ ID NO: 7831 - DNA, 22 bp, Artificial sequence
  Primer
  misc_feature (1)..(2): n is a, c, g, or t
  misc_feature (19)..(22): n is a, c, g, or t
nngactcggcgccgagtcnnnn

SEQ ID NO: 7832 - DNA, 22 bp, Artificial sequence
  Primer
cggactcggcgccgagtccgcc

SEQ ID NO: 7833 - DNA, 22 bp, Artificial sequence
  Primer
cggactcggcgccgagtccgct

SEQ ID NO: 7834 - DNA, 22 bp, Artificial sequence
  Primer
cggactcggcgccgagtccgtc

SEQ ID NO: 7835 - DNA, 22 bp, Artificial sequence
  Primer
aggactcggcgccgagtcctcc

SEQ ID NO: 7836 - DNA, 22 bp, Artificial sequence
  Primer
cagactcggcgccgagtctgcc

SEQ ID NO: 7837 - DNA, 22 bp, Artificial sequence
  Primer
cggactcggcgccgagtccgca

SEQ ID NO: 7838 - DNA, 22 bp, Artificial sequence
  Primer
cggactcggcgccgagtccgac

SEQ ID NO: 7839 - DNA, 22 bp, Artificial sequence
  Primer
tggactcggcgccgagtccacc

SEQ ID NO: 7840 - DNA, 22 bp, Artificial sequence
  Primer
ctgactcggcgccgagtcagcc

SEQ ID NO: 7841 - DNA, 22 bp, Artificial sequence
  Primer
ccgactcggcgccgagtcgggc

SEQ ID NO: 7842 - DNA, 22 bp, Artificial sequence
  Primer
ccgactcggcgccgagtcgggt

SEQ ID NO: 7843 - DNA, 22 bp, Artificial sequence
  Primer
ccgactcggcgccgagtcggtc

SEQ ID NO: 7844 - DNA, 22 bp, Artificial sequence
  Primer
acgactcggcgccgagtcgtgc

SEQ ID NO: 7845 - DNA, 22 bp, Artificial sequence
  Primer
cagactcggcgccgagtctggc

SEQ ID NO: 7846 - DNA, 22 bp, Artificial sequence
  Primer
ccgactcggcgccgagtcggga

SEQ ID NO: 7847 - DNA, 22 bp, Artificial sequence
  Primer
ccgactcggcgccgagtcggac

SEQ ID NO: 7848 - DNA, 22 bp, Artificial sequence
  Primer
ctgactcggcgccgagtcaggc

SEQ ID NO: 7849 - DNA, 22 bp, Artificial sequence
  Primer
gcgactcggcgccgagtcgccc

SEQ ID NO: 7850 - DNA, 22 bp, Artificial sequence
  Primer
gcgactcggcgccgagtcgcct

SEQ ID NO: 7851 - DNA, 22 bp, Artificial sequence
  Primer
gcgactcggcgccgagtcgctc

SEQ ID NO: 7852 - DNA, 22 bp, Artificial sequence
  Primer
acgactcggcgccgagtcgtcc

SEQ ID NO: 7853 - DNA, 22 bp, Artificial sequence
  Primer
gagactcggcgccgagtctccc

SEQ ID NO: 7854 - DNA, 22 bp, Artificial sequence
  Primer
gcgactcggcgccgagtcgcca

SEQ ID NO: 7855 - DNA, 22 bp, Artificial sequence
  Primer
gcgactcggcgccgagtcgcac

SEQ ID NO: 7856 - DNA, 22 bp, Artificial sequence
  Primer
gtgactcggcgccgagtcaccc

SEQ ID NO: 7857 - DNA, 22 bp, Artificial sequence
  Primer
gggactcggcgccgagtcccgt

SEQ ID NO: 7858 - DNA, 22 bp, Artificial sequence
  Primer
gggactcggcgccgagtccctg

SEQ ID NO: 7859 - DNA, 22 bp, Artificial sequence
  Primer
aggactcggcgccgagtcctgg

SEQ ID NO: 7860 - DNA, 22 bp, Artificial sequence
  Primer
gagactcggcgccgagtctcgg

SEQ ID NO: 7861 - DNA, 22 bp, Artificial sequence
  Primer
gggactcggcgccgagtcccga

SEQ ID NO: 7862 - DNA, 22 bp, Artificial sequence
  Primer
gggactcggcgccgagtcccag

SEQ ID NO: 7863 - DNA, 22 bp, Artificial sequence
  Primer
tggactcggcgccgagtccagg

SEQ ID NO: 7864 - DNA, 22 bp, Artificial sequence
  Primer
gtgactcggcgccgagtcacgg

SEQ ID NO: 7865 - DNA, 22 bp, Artificial sequence
  Primer
gcgactcggcgccgagtcgccg

SEQ ID NO: 7866 - DNA, 22 bp, Artificial sequence
  Primer
gcgactcggcgccgagtcgctg

SEQ ID NO: 7867 - DNA, 22 bp, Artificial sequence
  Primer
acgactcggcgccgagtcgtcg

SEQ ID NO: 7868 - DNA, 22 bp, Artificial sequence
  Primer
gagactcggcgccgagtctccg

SEQ ID NO: 7869 - DNA, 22 bp, Artificial sequence
  Primer
gcgactcggcgccgagtcgcag

SEQ ID NO: 7870 - DNA, 22 bp, Artificial sequence
  Primer
gtgactcggcgccgagtcaccg

SEQ ID NO: 7871 - DNA, 22 bp, Artificial sequence
  Primer
cggactcggcgccgagtccgtg

SEQ ID NO: 7872 - DNA, 22 bp, Artificial sequence
  Primer
cagactcggcgccgagtctggg

SEQ ID NO: 7873 - DNA, 22 bp, Artificial sequence
  Primer
cggactcggcgccgagtccgag

SEQ ID NO: 7874 - DNA, 22 bp, Artificial sequence
  Primer
ctgactcggcgccgagtcaggg

SEQ ID NO: 7875 - DNA, 22 bp, Artificial sequence
  Primer
acgactcggcgccgagtcgtgg

SEQ ID NO: 7876 - DNA, 22 bp, Artificial sequence
  Primer
ccgactcggcgccgagtcggct

SEQ ID NO: 7877 - DNA, 22 bp, Artificial sequence
  Primer
ccgactcggcgccgagtcggca

SEQ ID NO: 7878 - DNA, 22 bp, Artificial sequence
  Primer
gagactcggcgccgagtctcgc

SEQ ID NO: 7879 - DNA, 22 bp, Artificial sequence
  Primer
gtgactcggcgccgagtcacgc

SEQ ID NO: 7880 - DNA, 22 bp, Artificial sequence
  Primer
aggactcggcgccgagtcctgc

SEQ ID NO: 7881 - DNA, 22 bp, Artificial sequence
  Primer
tggactcggcgccgagtccagc

SEQ ID NO: 7882 - DNA, 22 bp, Artificial sequence
  Primer
aggactcggcgccgagtcctcg

SEQ ID NO: 7883 - DNA, 22 bp, Artificial sequence
  Primer
tggactcggcgccgagtccacg

SEQ ID NO: 7884 - DNA, 22 bp, Artificial sequence
  Primer
ccgactcggcgccgagtcggtg

SEQ ID NO: 7885 - DNA, 22 bp, Artificial sequence
  Primer
ccgactcggcgccgagtcggag

SEQ ID NO: 7886 - DNA, 22 bp, Artificial sequence
  Primer
gggactcggcgccgagtcccgc

SEQ ID NO: 7887 - DNA, 22 bp, Artificial sequence
  Primer
gggactcggcgccgagtccctc

SEQ ID NO: 7888 - DNA, 22 bp, Artificial sequence
  Primer
gggactcggcgccgagtcccac

SEQ ID NO: 7889 - DNA, 22 bp, Artificial sequence
  Primer
  misc_feature (1)..(2): n is a, c, g, or t
  misc_feature (19)..(22): n is a, c, g, or t
nngactcccatgggagtcnnnn

SEQ ID NO: 7890 - DNA, 22 bp, Artificial sequence
  Primer
cggactcccatgggagtccgcc

SEQ ID NO: 7891 - DNA, 22 bp, Artificial sequence
  Primer
cggactcccatgggagtccgct

SEQ ID NO: 7892 - DNA, 22 bp, Artificial sequence
  Primer
cggactcccatgggagtccgtc

SEQ ID NO: 7893 - DNA, 22 bp, Artificial sequence
  Primer
aggactcccatgggagtcctcc

SEQ ID NO: 7894 - DNA, 22 bp, Artificial sequence
  Primer
cagactcccatgggagtctgcc

SEQ ID NO: 7895 - DNA, 22 bp, Artificial sequence
  Primer
cggactcccatgggagtccgca

SEQ ID NO: 7896 - DNA, 22 bp, Artificial sequence
  Primer
cggactcccatgggagtccgac

SEQ ID NO: 7897 - DNA, 22 bp, Artificial sequence
  Primer
tggactcccatgggagtccacc

SEQ ID NO: 7898 - DNA, 22 bp, Artificial sequence
  Primer
ctgactcccatgggagtcagcc

SEQ ID NO: 7899 - DNA, 22 bp, Artificial sequence
  Primer
ccgactcccatgggagtcgggc

SEQ ID NO: 7900 - DNA, 22 bp, Artificial sequence
  Primer
ccgactcccatgggagtcgggt

SEQ ID NO: 7901 - DNA, 22 bp, Artificial sequence
  Primer
ccgactcccatgggagtcggtc

SEQ ID NO: 7902 - DNA, 22 bp, Artificial sequence
  Primer
acgactcccatgggagtcgtgc

SEQ ID NO: 7903 - DNA, 22 bp, Artificial sequence
  Primer
cagactcccatgggagtctggc

SEQ ID NO: 7904 - DNA, 22 bp, Artificial sequence
  Primer
ccgactcccatgggagtcggga

SEQ ID NO: 7905 - DNA, 22 bp, Artificial sequence
  Primer
ccgactcccatgggagtcggac

SEQ ID NO: 7906 - DNA, 22 bp, Artificial sequence
  Primer
ctgactcccatgggagtcaggc

SEQ ID NO: 7907 - DNA, 22 bp, Artificial sequence
  Primer
gcgactcccatgggagtcgccc

SEQ ID NO: 7908 - DNA, 22 bp, Artificial sequence
  Primer
gcgactcccatgggagtcgcct

SEQ ID NO: 7909 - DNA, 22 bp, Artificial sequence
  Primer
gcgactcccatgggagtcgctc

SEQ ID NO: 7910 - DNA, 22 bp, Artificial sequence
  Primer
acgactcccatgggagtcgtcc

SEQ ID NO: 7911 - DNA, 22 bp, Artificial sequence
  Primer
gagactcccatgggagtctccc

SEQ ID NO: 7912 - DNA, 22 bp, Artificial sequence
  Primer
gcgactcccatgggagtcgcca

SEQ ID NO: 7913 - DNA, 22 bp, Artificial sequence
  Primer
gcgactcccatgggagtcgcac

SEQ ID NO: 7914 - DNA, 22 bp, Artificial sequence
  Primer
gtgactcccatgggagtcaccc

SEQ ID NO: 7915 - DNA, 22 bp, Artificial sequence
  Primer
gggactcccatgggagtcccgt

SEQ ID NO: 7916 - DNA, 22 bp, Artificial sequence
  Primer
gggactcccatgggagtccctg

SEQ ID NO: 7917 - DNA, 22 bp, Artificial sequence
  Primer
aggactcccatgggagtcctgg

SEQ ID NO: 7918 - DNA, 22 bp, Artificial sequence
  Primer
gagactcccatgggagtctcgg

SEQ ID NO: 7919 - DNA, 22 bp, Artificial sequence
  Primer
gggactcccatgggagtcccga

SEQ ID NO: 7920 - DNA, 22 bp, Artificial sequence
  Primer
gggactcccatgggagtcccag

SEQ ID NO: 7921 - DNA, 22 bp, Artificial sequence
  Primer
tggactcccatgggagtccagg

SEQ ID NO: 7922 - DNA, 22 bp, Artificial sequence
  Primer
gtgactcccatgggagtcacgg

SEQ ID NO: 7923 - DNA, 22 bp, Artificial sequence
  Primer
gcgactcccatgggagtcgccg

SEQ ID NO: 7924 - DNA, 22 bp, Artificial sequence
  Primer
gcgactcccatgggagtcgctg

SEQ ID NO: 7925 - DNA, 22 bp, Artificial sequence
  Primer
acgactcccatgggagtcgtcg

SEQ ID NO: 7926 - DNA, 22 bp, Artificial sequence
  Primer
gagactcccatgggagtctccg

SEQ ID NO: 7927 - DNA, 22 bp, Artificial sequence
  Primer
gcgactcccatgggagtcgcag

SEQ ID NO: 7928 - DNA, 22 bp, Artificial sequence
  Primer
gtgactcccatgggagtcaccg

SEQ ID NO: 7929 - DNA, 22 bp, Artificial sequence
  Primer
cggactcccatgggagtccgtg

SEQ ID NO: 7930 - DNA, 22 bp, Artificial sequence
  Primer
cagactcccatgggagtctggg

SEQ ID NO: 7931 - DNA, 22 bp, Artificial sequence
  Primer
cggactcccatgggagtccgag

SEQ ID NO: 7932 - DNA, 22 bp, Artificial sequence
  Primer
ctgactcccatgggagtcaggg

SEQ ID NO: 7933 - DNA, 22 bp, Artificial sequence
  Primer
acgactcccatgggagtcgtgg

SEQ ID NO: 7934 - DNA, 22 bp, Artificial sequence
  Primer
ccgactcccatgggagtcggct

SEQ ID NO: 7935 - DNA, 22 bp, Artificial sequence
  Primer
ccgactcccatgggagtcggca

SEQ ID NO: 7936 - DNA, 22 bp, Artificial sequence
  Primer
gagactcccatgggagtctcgc

SEQ ID NO: 7937 - DNA, 22 bp, Artificial sequence
  Primer
gtgactcccatgggagtcacgc

SEQ ID NO: 7938 - DNA, 22 bp, Artificial sequence
  Primer
aggactcccatgggagtcctgc

SEQ ID NO: 7939 - DNA, 22 bp, Artificial sequence
  Primer
tggactcccatgggagtccagc

SEQ ID NO: 7940 - DNA, 22 bp, Artificial sequence
  Primer
aggactcccatgggagtcctcg

SEQ ID NO: 7941 - DNA, 22 bp, Artificial sequence
  Primer
tggactcccatgggagtccacg

SEQ ID NO: 7942 - DNA, 22 bp, Artificial sequence
  Primer
ccgactcccatgggagtcggtg

SEQ ID NO: 7943 - DNA, 22 bp, Artificial sequence
  Primer
ccgactcccatgggagtcggag

SEQ ID NO: 7944 - DNA, 22 bp, Artificial sequence
  Primer
gggactcccatgggagtcccgc

SEQ ID NO: 7945 - DNA, 22 bp, Artificial sequence
  Primer
gggactcccatgggagtccctc

SEQ ID NO: 7946 - DNA, 22 bp, Artificial sequence
  Primer
gggactcccatgggagtcccac

SEQ ID NO: 7947 - DNA, 22 bp, Artificial sequence
  Primer
  misc_feature (1)..(2): n is a, c, g, or t
  misc_feature (19)..(22): n is a, c, g, or t
nngactccctagggagtcnnnn

SEQ ID NO: 7948 - DNA, 22 bp, Artificial sequence
  Primer
cggactccctagggagtccgcc

SEQ ID NO: 7949 - DNA, 22 bp, Artificial sequence
  Primer
cggactccctagggagtccgct

SEQ ID NO: 7950 - DNA, 22 bp, Artificial sequence
  Primer
cggactccctagggagtccgtc

SEQ ID NO: 7951 - DNA, 22 bp, Artificial sequence
  Primer
aggactccctagggagtcctcc

SEQ ID NO: 7952 - DNA, 22 bp, Artificial sequence
  Primer
cagactccctagggagtctgcc

SEQ ID NO: 7953 - DNA, 22 bp, Artificial sequence
  Primer
cggactccctagggagtccgca

SEQ ID NO: 7954 - DNA, 22 bp, Artificial sequence
  Primer
cggactccctagggagtccgac

SEQ ID NO: 7955 - DNA, 22 bp, Artificial sequence
  Primer
tggactccctagggagtccacc

SEQ ID NO: 7956 - DNA, 22 bp, Artificial sequence
  Primer
ctgactccctagggagtcagcc

SEQ ID NO: 7957 - DNA, 22 bp, Artificial sequence
  Primer
ccgactccctagggagtcgggc

SEQ ID NO: 7958 - DNA, 22 bp, Artificial sequence
  Primer
ccgactccctagggagtcgggt

SEQ ID NO: 7959 - DNA, 22 bp, Artificial sequence
  Primer
ccgactccctagggagtcggtc

SEQ ID NO: 7960 - DNA, 22 bp, Artificial sequence
  Primer
acgactccctagggagtcgtgc

SEQ ID NO: 7961 - DNA, 22 bp, Artificial sequence
  Primer
cagactccctagggagtctggc

SEQ ID NO: 7962 - DNA, 22 bp, Artificial sequence
  Primer
ccgactccctagggagtcggga

SEQ ID NO: 7963 - DNA, 22 bp, Artificial sequence
  Primer
ccgactccctagggagtcggac

SEQ ID NO: 7964 - DNA, 22 bp, Artificial sequence
  Primer
ctgactccctagggagtcaggc

SEQ ID NO: 7965 - DNA, 22 bp, Artificial sequence
  Primer
gcgactccctagggagtcgccc

SEQ ID NO: 7966 - DNA, 22 bp, Artificial sequence
  Primer
gcgactccctagggagtcgcct

SEQ ID NO: 7967 - DNA, 22 bp, Artificial sequence
  Primer
gcgactccctagggagtcgctc

SEQ ID NO: 7968 - DNA, 22 bp, Artificial sequence
  Primer
acgactccctagggagtcgtcc

SEQ ID NO: 7969 - DNA, 22 bp, Artificial sequence
  Primer
gagactccctagggagtctccc

SEQ ID NO: 7970 - DNA, 22 bp, Artificial sequence
  Primer
gcgactccctagggagtcgcca

SEQ ID NO: 7971 - DNA, 22 bp, Artificial sequence
  Primer
gcgactccctagggagtcgcac

SEQ ID NO: 7972 - DNA, 22 bp, Artificial sequence
  Primer
gtgactccctagggagtcaccc

SEQ ID NO: 7973 - DNA, 22 bp, Artificial sequence
  Primer
gggactccctagggagtcccgt

SEQ ID NO: 7974 - DNA, 22 bp, Artificial sequence
  Primer
gggactccctagggagtccctg

SEQ ID NO: 7975 - DNA, 22 bp, Artificial sequence
  Primer
aggactccctagggagtcctgg

SEQ ID NO: 7976 - DNA, 22 bp, Artificial sequence
  Primer
gagactccctagggagtctcgg

SEQ ID NO: 7977 - DNA, 22 bp, Artificial sequence
  Primer
gggactccctagggagtcccga

SEQ ID NO: 7978 - DNA, 22 bp, Artificial sequence
  Primer
gggactccctagggagtcccag

SEQ ID NO: 7979 - DNA, 22 bp, Artificial sequence
  Primer
tggactccctagggagtccagg

SEQ ID NO: 7980 - DNA, 22 bp, Artificial sequence
  Primer
gtgactccctagggagtcacgg

SEQ ID NO: 7981 - DNA, 22 bp, Artificial sequence
  Primer
gcgactccctagggagtcgccg

SEQ ID NO: 7982 - DNA, 22 bp, Artificial sequence
  Primer
gcgactccctagggagtcgctg

SEQ ID NO: 7983 - DNA, 22 bp, Artificial sequence
  Primer
acgactccctagggagtcgtcg

SEQ ID NO: 7984 - DNA, 22 bp, Artificial sequence
  Primer
gagactccctagggagtctccg

SEQ ID NO: 7985 - DNA, 22 bp, Artificial sequence
  Primer
gcgactccctagggagtcgcag

SEQ ID NO: 7986 - DNA, 22 bp, Artificial sequence
  Primer
gtgactccctagggagtcaccg

SEQ ID NO: 7987 - DNA, 22 bp, Artificial sequence
  Primer
cggactccctagggagtccgtg

SEQ ID NO: 7988 - DNA, 22 bp, Artificial sequence
  Primer
cagactccctagggagtctggg

SEQ ID NO: 7989 - DNA, 22 bp, Artificial sequence
  Primer
cggactccctagggagtccgag

SEQ ID NO: 7990 - DNA, 22 bp, Artificial sequence
  Primer
ctgactccctagggagtcaggg

SEQ ID NO: 7991 - DNA, 22 bp, Artificial sequence
  Primer
acgactccctagggagtcgtgg

SEQ ID NO: 7992 - DNA, 22 bp, Artificial sequence
  Primer
ccgactccctagggagtcggct

SEQ ID NO: 7993 - DNA, 22 bp, Artificial sequence
  Primer
ccgactccctagggagtcggca

SEQ ID NO: 7994 - DNA, 22 bp, Artificial sequence
  Primer
gagactccctagggagtctcgc

SEQ ID NO: 7995 - DNA, 22 bp, Artificial sequence
  Primer
gtgactccctagggagtcacgc

SEQ ID NO: 7996 - DNA, 22 bp, Artificial sequence
  Primer
aggactccctagggagtcctgc

SEQ ID NO: 7997 - DNA, 22 bp, Artificial sequence
  Primer
tggactccctagggagtccagc

SEQ ID NO: 7998 - DNA, 22 bp, Artificial sequence
  Primer
aggactccctagggagtcctcg

SEQ ID NO: 7999 - DNA, 22 bp, Artificial sequence
  Primer
tggactccctagggagtccacg

SEQ ID NO: 8000 - DNA, 22 bp, Artificial sequence
  Primer
ccgactccctagggagtcggtg

SEQ ID NO: 8001 - DNA, 22 bp, Artificial sequence
  Primer
ccgactccctagggagtcggag

SEQ ID NO: 8002 - DNA, 22 bp, Artificial sequence
  Primer
gggactccctagggagtcccgc

SEQ ID NO: 8003 - DNA, 22 bp, Artificial sequence
  Primer
gggactccctagggagtccctc

SEQ ID NO: 8004 - DNA, 22 bp, Artificial sequence
  Primer
gggactccctagggagtcccac

SEQ ID NO: 8005 - DNA, 22 bp, Artificial sequence
  Primer
  misc_feature (1)..(2): n is a, c, g, or t
  misc_feature (19)..(22): n is a, c, g, or t
nngactcccgcgggagtcnnnn

SEQ ID NO: 8006 - DNA, 22 bp, Artificial sequence
  Primer
cggactcccgcgggagtccgcc

SEQ ID NO: 8007 - DNA, 22 bp, Artificial sequence
  Primer
cggactcccgcgggagtccgct

SEQ ID NO: 8008 - DNA, 22 bp, Artificial sequence
  Primer
cggactcccgcgggagtccgtc

SEQ ID NO: 8009 - DNA, 22 bp, Artificial sequence
  Primer
aggactcccgcgggagtcctcc

SEQ ID NO: 8010 - DNA, 22 bp, Artificial sequence
  Primer
cagactcccgcgggagtctgcc

SEQ ID NO: 8011 - DNA, 22 bp, Artificial sequence
  Primer
cggactcccgcgggagtccgca

SEQ ID NO: 8012 - DNA, 22 bp, Artificial sequence
  Primer
cggactcccgcgggagtccgac

SEQ ID NO: 8013 - DNA, 22 bp, Artificial sequence
  Primer
tggactcccgcgggagtccacc

SEQ ID NO: 8014 - DNA, 22 bp, Artificial sequence
  Primer
ctgactcccgcgggagtcagcc

SEQ ID NO: 8015 - DNA, 22 bp, Artificial sequence
  Primer
ccgactcccgcgggagtcgggc

SEQ ID NO: 8016 - DNA, 22 bp, Artificial sequence
  Primer
ccgactcccgcgggagtcgggt

SEQ ID NO: 8017 - DNA, 22 bp, Artificial sequence
  Primer
ccgactcccgcgggagtcggtc

SEQ ID NO: 8018 - DNA, 22 bp, Artificial sequence
  Primer
acgactcccgcgggagtcgtgc

SEQ ID NO: 8019 - DNA, 22 bp, Artificial sequence
  Primer
cagactcccgcgggagtctggc

SEQ ID NO: 8020 - DNA, 22 bp, Artificial sequence
  Primer
ccgactcccgcgggagtcggga

SEQ ID NO: 8021 - DNA, 22 bp, Artificial sequence
  Primer
ccgactcccgcgggagtcggac

SEQ ID NO: 8022 - DNA, 22 bp, Artificial sequence
  Primer
ctgactcccgcgggagtcaggc

SEQ ID NO: 8023 - DNA, 22 bp, Artificial sequence
  Primer
gcgactcccgcgggagtcgccc

SEQ ID NO: 8024 - DNA, 22 bp, Artificial sequence
  Primer
gcgactcccgcgggagtcgcct

SEQ ID NO: 8025 - DNA, 22 bp, Artificial sequence
  Primer
gcgactcccgcgggagtcgctc

SEQ ID NO: 8026 - DNA, 22 bp, Artificial sequence
  Primer
acgactcccgcgggagtcgtcc

SEQ ID NO: 8027 - DNA, 22 bp, Artificial sequence
  Primer
gagactcccgcgggagtctccc

SEQ ID NO: 8028 - DNA, 22 bp, Artificial sequence
  Primer
gcgactcccgcgggagtcgcca

SEQ ID NO: 8029 - DNA, 22 bp, Artificial sequence
  Primer
gcgactcccgcgggagtcgcac

SEQ ID NO: 8030 - DNA, 22 bp, Artificial sequence
  Primer
gtgactcccgcgggagtcaccc

SEQ ID NO: 8031 - DNA, 22 bp, Artificial sequence
  Primer
gggactcccgcgggagtcccgt

SEQ ID NO: 8032 - DNA, 22 bp, Artificial sequence
  Primer
gggactcccgcgggagtccctg

SEQ ID NO: 8033 - DNA, 22 bp, Artificial sequence
  Primer
aggactcccgcgggagtcctgg

SEQ ID NO: 8034 - DNA, 22 bp, Artificial sequence
  Primer
gagactcccgcgggagtctcgg

SEQ ID NO: 8035 - DNA, 22 bp, Artificial sequence
  Primer
gggactcccgcgggagtcccga

SEQ ID NO: 8036 - DNA, 22 bp, Artificial sequence
  Primer
gggactcccgcgggagtcccag

SEQ ID NO: 8037 - DNA, 22 bp, Artificial sequence
  Primer
tggactcccgcgggagtccagg

SEQ ID NO: 8038 - DNA, 22 bp, Artificial sequence
  Primer
gtgactcccgcgggagtcacgg

SEQ ID NO: 8039 - DNA, 22 bp, Artificial sequence
  Primer
gcgactcccgcgggagtcgccg

SEQ ID NO: 8040 - DNA, 22 bp, Artificial sequence
  Primer
gcgactcccgcgggagtcgctg

SEQ ID NO: 8041 - DNA, 22 bp, Artificial sequence
  Primer
acgactcccgcgggagtcgtcg

SEQ ID NO: 8042 - DNA, 22 bp, Artificial sequence
  Primer
gagactcccgcgggagtctccg

SEQ ID NO: 8043 - DNA, 22 bp, Artificial sequence
  Primer
gcgactcccgcgggagtcgcag

SEQ ID NO: 8044 - DNA, 22 bp, Artificial sequence
  Primer
gtgactcccgcgggagtcaccg

SEQ ID NO: 8045 - DNA, 22 bp, Artificial sequence
  Primer
cggactcccgcgggagtccgtg

SEQ ID NO: 8046 - DNA, 22 bp, Artificial sequence
  Primer
cagactcccgcgggagtctggg

SEQ ID NO: 8047 - DNA, 22 bp, Artificial sequence
  Primer
cggactcccgcgggagtccgag

SEQ ID NO: 8048 - DNA, 22 bp, Artificial sequence
  Primer
ctgactcccgcgggagtcaggg

SEQ ID NO: 8049 - DNA, 22 bp, Artificial sequence
  Primer
acgactcccgcgggagtcgtgg

SEQ ID NO: 8050 - DNA, 22 bp, Artificial sequence
  Primer
ccgactcccgcgggagtcggct

SEQ ID NO: 8051 - DNA, 22 bp, Artificial sequence
  Primer
ccgactcccgcgggagtcggca

SEQ ID NO: 8052 - DNA, 22 bp, Artificial sequence
  Primer
gagactcccgcgggagtctcgc

SEQ ID NO: 8053 - DNA, 22 bp, Artificial sequence
  Primer
gtgactcccgcgggagtcacgc

SEQ ID NO: 8054 - DNA, 22 bp, Artificial sequence
  Primer
aggactcccgcgggagtcctgc

SEQ ID NO: 8055 - DNA, 22 bp, Artificial sequence
  Primer
tggactcccgcgggagtccagc

SEQ ID NO: 8056 - DNA, 22 bp, Artificial sequence
  Primer
aggactcccgcgggagtcctcg

SEQ ID NO: 8057 - DNA, 22 bp, Artificial sequence
  Primer
tggactcccgcgggagtccacg

SEQ ID NO: 8058 - DNA, 22 bp, Artificial sequence
  Primer
ccgactcccgcgggagtcggtg

SEQ ID NO: 8059 - DNA, 22 bp, Artificial sequence
  Primer
ccgactcccgcgggagtcggag

SEQ ID NO: 8060 - DNA, 22 bp, Artificial sequence
  Primer
gggactcccgcgggagtcccgc

SEQ ID NO: 8061 - DNA, 22 bp, Artificial sequence
  Primer
gggactcccgcgggagtccctc

SEQ ID NO: 8062 - DNA, 22 bp, Artificial sequence
  Primer
gggactcccgcgggagtcccac

SEQ ID NO: 8063 - DNA, 22 bp, Artificial sequence
  Primer
  misc_feature (1)..(2): n is a, c, g, or t
  misc_feature (19)..(22): n is a, c, g, or t
nngactccccggggagtcnnnn

SEQ ID NO: 8064 - DNA, 22 bp, Artificial sequence
  Primer
cggactccccggggagtccgcc

SEQ ID NO: 8065 - DNA, 22 bp, Artificial sequence
  Primer
cggactccccggggagtccgct

SEQ ID NO: 8066 - DNA, 22 bp, Artificial sequence
  Primer
cggactccccggggagtccgtc

SEQ ID NO: 8067 - DNA, 22 bp, Artificial sequence
  Primer
aggactccccggggagtcctcc

SEQ ID NO: 8068 - DNA, 22 bp, Artificial sequence
  Primer
cagactccccggggagtctgcc

SEQ ID NO: 8069 - DNA, 22 bp, Artificial sequence
  Primer
cggactccccggggagtccgca

SEQ ID NO: 8070 - DNA, 22 bp, Artificial sequence
  Primer
cggactccccggggagtccgac

SEQ ID NO: 8071 - DNA, 22 bp, Artificial sequence
  Primer
tggactccccggggagtccacc

SEQ ID NO: 8072 - DNA, 22 bp, Artificial sequence
  Primer
ctgactccccggggagtcagcc

SEQ ID NO: 8073 - DNA, 22 bp, Artificial sequence
  Primer
ccgactccccggggagtcgggc

SEQ ID NO: 8074 - DNA, 22 bp, Artificial sequence
  Primer
ccgactccccggggagtcgggt

SEQ ID NO: 8075 - DNA, 22 bp, Artificial sequence
  Primer
ccgactccccggggagtcggtc

SEQ ID NO: 8076 - DNA, 22 bp, Artificial sequence
  Primer
acgactccccggggagtcgtgc

SEQ ID NO: 8077 - DNA, 22 bp, Artificial sequence
  Primer
cagactccccggggagtctggc

SEQ ID NO: 8078 - DNA, 22 bp, Artificial sequence
  Primer
ccgactccccggggagtcggga

SEQ ID NO: 8079 - DNA, 22 bp, Artificial sequence
  Primer
ccgactccccggggagtcggac

SEQ ID NO: 8080 - DNA, 22 bp, Artificial sequence
  Primer
ctgactccccggggagtcaggc

SEQ ID NO: 8081 - DNA, 22 bp, Artificial sequence
  Primer
gcgactccccggggagtcgccc

SEQ ID NO: 8082 - DNA, 22 bp, Artificial sequence
  Primer
gcgactccccggggagtcgcct

SEQ ID NO: 8083 - DNA, 22 bp, Artificial sequence
  Primer
gcgactccccggggagtcgctc

SEQ ID NO: 8084 - DNA, 22 bp, Artificial sequence
  Primer
acgactccccggggagtcgtcc

SEQ ID NO: 8085 - DNA, 22 bp, Artificial sequence
  Primer
gagactccccggggagtctccc

SEQ ID NO: 8086 - DNA, 22 bp, Artificial sequence
  Primer
gcgactccccggggagtcgcca

SEQ ID NO: 8087 - DNA, 22 bp, Artificial sequence
  Primer
gcgactccccggggagtcgcac

SEQ ID NO: 8088 - DNA, 22 bp, Artificial sequence
  Primer
gtgactccccggggagtcaccc

SEQ ID NO: 8089 - DNA, 22 bp, Artificial sequence
  Primer
gggactccccggggagtcccgt

SEQ ID NO: 8090 - DNA, 22 bp, Artificial sequence
  Primer
gggactccccggggagtccctg

SEQ ID NO: 8091 - DNA, 22 bp, Artificial sequence
  Primer
aggactccccggggagtcctgg

SEQ ID NO: 8092 - DNA, 22 bp, Artificial sequence
  Primer
gagactccccggggagtctcgg

SEQ ID NO: 8093 - DNA, 22 bp, Artificial sequence
  Primer
gggactccccggggagtcccga

SEQ ID NO: 8094 - DNA, 22 bp, Artificial sequence
  Primer
gggactccccggggagtcccag

SEQ ID NO: 8095 - DNA, 22 bp, Artificial sequence
  Primer
tggactccccggggagtccagg

SEQ ID NO: 8096 - DNA, 22 bp, Artificial sequence
  Primer
gtgactccccggggagtcacgg

SEQ ID NO: 8097 - DNA, 22 bp, Artificial sequence
  Primer
gcgactccccggggagtcgccg

SEQ ID NO: 8098 - DNA, 22 bp, Artificial sequence
  Primer
gcgactccccggggagtcgctg

SEQ ID NO: 8099 - DNA, 22 bp, Artificial sequence
  Primer
acgactccccggggagtcgtcg

SEQ ID NO: 8100 - DNA, 22 bp, Artificial sequence
  Primer
gagactccccggggagtctccg

SEQ ID NO: 8101 - DNA, 22 bp, Artificial sequence
  Primer
gcgactccccggggagtcgcag

SEQ ID NO: 8102 - DNA, 22 bp, Artificial sequence
  Primer
gtgactccccggggagtcaccg

SEQ ID NO: 8103 - DNA, 22 bp, Artificial sequence
  Primer
cggactccccggggagtccgtg

SEQ ID NO: 8104 - DNA, 22 bp, Artificial sequence
  Primer
cagactccccggggagtctggg

SEQ ID NO: 8105 - DNA, 22 bp, Artificial sequence
  Primer
cggactccccggggagtccgag

SEQ ID NO: 8106 - DNA, 22 bp, Artificial sequence
  Primer
ctgactccccggggagtcaggg

SEQ ID NO: 8107 - DNA, 22 bp, Artificial sequence
  Primer
acgactccccggggagtcgtgg

SEQ ID NO: 8108 - DNA, 22 bp, Artificial sequence
  Primer
ccgactccccggggagtcggct

SEQ ID NO: 8109 - DNA, 22 bp, Artificial sequence
  Primer
ccgactccccggggagtcggca

SEQ ID NO: 8110 - DNA, 22 bp, Artificial sequence
  Primer
gagactccccggggagtctcgc

SEQ ID NO: 8111 - DNA, 22 bp, Artificial sequence
  Primer
gtgactccccggggagtcacgc

SEQ ID NO: 8112 - DNA, 22 bp, Artificial sequence
  Primer
aggactccccggggagtcctgc

SEQ ID NO: 8113 - DNA, 22 bp, Artificial sequence
  Primer
tggactccccggggagtccagc

SEQ ID NO: 8114 - DNA, 22 bp, Artificial sequence
  Primer
aggactccccggggagtcctcg

SEQ ID NO: 8115 - DNA, 22 bp, Artificial sequence
  Primer
tggactccccggggagtccacg

SEQ ID NO: 8116 - DNA, 22 bp, Artificial sequence
  Primer
ccgactccccggggagtcggtg

SEQ ID NO: 8117 - DNA, 22 bp, Artificial sequence
  Primer
ccgactccccggggagtcggag

SEQ ID NO: 8118 - DNA, 22 bp, Artificial sequence
  Primer
gggactccccggggagtcccgc

SEQ ID NO: 8119 - DNA, 22 bp, Artificial sequence
  Primer
gggactccccggggagtccctc

SEQ ID NO: 8120 - DNA, 22 bp, Artificial sequence
  Primer
gggactccccggggagtcccac

SEQ ID NO: 8121 - DNA, 22 bp, Artificial sequence
  Primer
  misc_feature (1)..(2): n is a, c, g, or t
  misc_feature (19)..(22): n is a, c, g, or t
nngactcgtatacgagtcnnnn

SEQ ID NO: 8122 - DNA, 22 bp, Artificial sequence
  Primer
cggactcgtatacgagtccgcc

SEQ ID NO: 8123 - DNA, 22 bp, Artificial sequence
  Primer
cggactcgtatacgagtccgct

SEQ ID NO: 8124 - DNA, 22 bp, Artificial sequence
  Primer
cggactcgtatacgagtccgtc

SEQ ID NO: 8125 - DNA, 22 bp, Artificial sequence
  Primer
aggactcgtatacgagtcctcc

SEQ ID NO: 8126 - DNA, 22 bp, Artificial sequence
  Primer
cagactcgtatacgagtctgcc

SEQ ID NO: 8127 - DNA, 22 bp, Artificial sequence
  Primer
cggactcgtatacgagtccgca

SEQ ID NO: 8128 - DNA, 22 bp, Artificial sequence
  Primer
cggactcgtatacgagtccgac

SEQ ID NO: 8129 - DNA, 22 bp, Artificial sequence
  Primer
tggactcgtatacgagtccacc

SEQ ID NO: 8130 - DNA, 22 bp, Artificial sequence
  Primer
ctgactcgtatacgagtcagcc

SEQ ID NO: 8131 - DNA, 22 bp, Artificial sequence
  Primer
ccgactcgtatacgagtcgggc

SEQ ID NO: 8132 - DNA, 22 bp, Artificial sequence
  Primer
ccgactcgtatacgagtcgggt

SEQ ID NO: 8133 - DNA, 22 bp, Artificial sequence
  Primer
ccgactcgtatacgagtcggtc

SEQ ID NO: 8134 - DNA, 22 bp, Artificial sequence
  Primer
acgactcgtatacgagtcgtgc

SEQ ID NO: 8135 - DNA, 22 bp, Artificial sequence
  Primer
cagactcgtatacgagtctggc

SEQ ID NO: 8136 - DNA, 22 bp, Artificial sequence
  Primer
ccgactcgtatacgagtcggga

SEQ ID NO: 8137 - DNA, 22 bp, Artificial sequence
  Primer
ccgactcgtatacgagtcggac

SEQ ID NO: 8138 - DNA, 22 bp, Artificial sequence
  Primer
ctgactcgtatacgagtcaggc

SEQ ID NO: 8139 - DNA, 22 bp, Artificial sequence
  Primer
gcgactcgtatacgagtcgccc

SEQ ID NO: 8140 - DNA, 22 bp, Artificial sequence
  Primer
gcgactcgtatacgagtcgcct

SEQ ID NO: 8141 - DNA, 22 bp, Artificial sequence
  Primer
gcgactcgtatacgagtcgctc

SEQ ID NO: 8142 - DNA, 22 bp, Artificial sequence
  Primer
acgactcgtatacgagtcgtcc

SEQ ID NO: 8143 - DNA, 22 bp, Artificial sequence
  Primer
gagactcgtatacgagtctccc

SEQ ID NO: 8144 - DNA, 22 bp, Artificial sequence
  Primer
gcgactcgtatacgagtcgcca

SEQ ID NO: 8145 - DNA, 22 bp, Artificial sequence
  Primer
gcgactcgtatacgagtcgcac

SEQ ID NO: 8146 - DNA, 22 bp, Artificial sequence
  Primer
gtgactcgtatacgagtcaccc

SEQ ID NO: 8147 - DNA, 22 bp, Artificial sequence
  Primer
gggactcgtatacgagtcccgt

SEQ ID NO: 8148 - DNA, 22 bp, Artificial sequence
  Primer
gggactcgtatacgagtccctg

SEQ ID NO: 8149 - DNA, 22 bp, Artificial sequence
  Primer
aggactcgtatacgagtcctgg

SEQ ID NO: 8150 - DNA, 22 bp, Artificial sequence
  Primer
gagactcgtatacgagtctcgg

SEQ ID NO: 8151 - DNA, 22 bp, Artificial sequence
  Primer
gggactcgtatacgagtcccga

SEQ ID NO: 8152 - DNA, 22 bp, Artificial sequence
  Primer
gggactcgtatacgagtcccag

SEQ ID NO: 8153 - DNA, 22 bp, Artificial sequence
  Primer
tggactcgtatacgagtccagg

SEQ ID NO: 8154 - DNA, 22 bp, Artificial sequence
  Primer
gtgactcgtatacgagtcacgg

SEQ ID NO: 8155 - DNA, 22 bp, Artificial sequence
  Primer
gcgactcgtatacgagtcgccg

SEQ ID NO: 8156 - DNA, 22 bp, Artificial sequence
  Primer
gcgactcgtatacgagtcgctg

SEQ ID NO: 8157 - DNA, 22 bp, Artificial sequence
  Primer
acgactcgtatacgagtcgtcg

SEQ ID NO: 8158 - DNA, 22 bp, Artificial sequence
  Primer
gagactcgtatacgagtctccg

SEQ ID NO: 8159 - DNA, 22 bp, Artificial sequence
  Primer
gcgactcgtatacgagtcgcag

SEQ ID NO: 8160 - DNA, 22 bp, Artificial sequence
  Primer
gtgactcgtatacgagtcaccg

SEQ ID NO: 8161 - DNA, 22 bp, Artificial sequence
  Primer
cggactcgtatacgagtccgtg

SEQ ID NO: 8162 - DNA, 22 bp, Artificial sequence
  Primer
cagactcgtatacgagtctggg

SEQ ID NO: 8163 - DNA, 22 bp, Artificial sequence
  Primer
cggactcgtatacgagtccgag

SEQ ID NO: 8164 - DNA, 22 bp, Artificial sequence
  Primer
ctgactcgtatacgagtcaggg

SEQ ID NO: 8165 - DNA, 22 bp, Artificial sequence
  Primer
acgactcgtatacgagtcgtgg

SEQ ID NO: 8166 - DNA, 22 bp, Artificial sequence
  Primer
ccgactcgtatacgagtcggct

SEQ ID NO: 8167 - DNA, 22 bp, Artificial sequence
  Primer
ccgactcgtatacgagtcggca

SEQ ID NO: 8168 - DNA, 22 bp, Artificial sequence
  Primer
gagactcgtatacgagtctcgc

SEQ ID NO: 8169 - DNA, 22 bp, Artificial sequence
  Primer
gtgactcgtatacgagtcacgc

SEQ ID NO: 8170 - DNA, 22 bp, Artificial sequence
  Primer
aggactcgtatacgagtcctgc

SEQ ID NO: 8171 - DNA, 22 bp, Artificial sequence
  Primer
tggactcgtatacgagtccagc

SEQ ID NO: 8172 - DNA, 22 bp, Artificial sequence
  Primer
aggactcgtatacgagtcctcg

SEQ ID NO: 8173 - DNA, 22 bp, Artificial sequence
  Primer
tggactcgtatacgagtccacg

SEQ ID NO: 8174 - DNA, 22 bp, Artificial sequence
  Primer
ccgactcgtatacgagtcggtg

SEQ ID NO: 8175 - DNA, 22 bp, Artificial sequence
  Primer
ccgactcgtatacgagtcggag

SEQ ID NO: 8176 - DNA, 22 bp, Artificial sequence
  Primer
gggactcgtatacgagtcccgc

SEQ ID NO: 8177 - DNA, 22 bp, Artificial sequence
  Primer
gggactcgtatacgagtccctc

SEQ ID NO: 8178 - DNA, 22 bp, Artificial sequence
  Primer
gggactcgtatacgagtcccac

SEQ ID NO: 8179 - DNA, 22 bp, Artificial sequence
  Primer
  misc_feature (1)..(2): n is a, c, g, or t
  misc_feature (19)..(22): n is a, c, g, or t
nngactcgttaacgagtcnnnn

SEQ ID NO: 8180 - DNA, 22 bp, Artificial sequence
  Primer
cggactcgttaacgagtccgcc

SEQ ID NO: 8181 - DNA, 22 bp, Artificial sequence
  Primer
cggactcgttaacgagtccgct

SEQ ID NO: 8182 - DNA, 22 bp, Artificial sequence
  Primer
cggactcgttaacgagtccgtc

SEQ ID NO: 8183 - DNA, 22 bp, Artificial sequence
  Primer
aggactcgttaacgagtcctcc

SEQ ID NO: 8184 - DNA, 22 bp, Artificial sequence
  Primer
cagactcgttaacgagtctgcc

SEQ ID NO: 8185 - DNA, 22 bp, Artificial sequence
  Primer
cggactcgttaacgagtccgca

SEQ ID NO: 8186 - DNA, 22 bp, Artificial sequence
  Primer
cggactcgttaacgagtccgac

SEQ ID NO: 8187 - DNA, 22 bp, Artificial sequence
  Primer
tggactcgttaacgagtccacc

SEQ ID NO: 8188 - DNA, 22 bp, Artificial sequence
  Primer
ctgactcgttaacgagtcagcc

SEQ ID NO: 8189 - DNA, 22 bp, Artificial sequence
  Primer
ccgactcgttaacgagtcgggc

SEQ ID NO: 8190 - DNA, 22 bp, Artificial sequence
  Primer
ccgactcgttaacgagtcgggt

SEQ ID NO: 8191 - DNA, 22 bp, Artificial sequence
  Primer
ccgactcgttaacgagtcggtc

SEQ ID NO: 8192 - DNA, 22 bp, Artificial sequence
  Primer
acgactcgttaacgagtcgtgc

SEQ ID NO: 8193 - DNA, 22 bp, Artificial sequence
  Primer
cagactcgttaacgagtctggc

SEQ ID NO: 8194 - DNA, 22 bp, Artificial sequence
  Primer
ccgactcgttaacgagtcggga

SEQ ID NO: 8195 - DNA, 22 bp, Artificial sequence
  Primer
ccgactcgttaacgagtcggac

SEQ ID NO: 8196 - DNA, 22 bp, Artificial sequence
  Primer
ctgactcgttaacgagtcaggc

SEQ ID NO: 8197 - DNA, 22 bp, Artificial sequence
  Primer
gcgactcgttaacgagtcgccc

SEQ ID NO: 8198 - DNA, 22 bp, Artificial sequence
  Primer
gcgactcgttaacgagtcgcct

SEQ ID NO: 8199 - DNA, 22 bp, Artificial sequence
  Primer
gcgactcgttaacgagtcgctc

SEQ ID NO: 8200 - DNA, 22 bp, Artificial sequence
  Primer
acgactcgttaacgagtcgtcc

SEQ ID NO: 8201 - DNA, 22 bp, Artificial sequence
  Primer
gagactcgttaacgagtctccc

SEQ ID NO: 8202 - DNA, 22 bp, Artificial sequence
  Primer
gcgactcgttaacgagtcgcca

SEQ ID NO: 8203 - DNA, 22 bp, Artificial sequence
  Primer
gcgactcgttaacgagtcgcac

SEQ ID NO: 8204 - DNA, 22 bp, Artificial sequence
  Primer
gtgactcgttaacgagtcaccc

SEQ ID NO: 8205 - DNA, 22 bp, Artificial sequence
  Primer
gggactcgttaacgagtcccgt

SEQ ID NO: 8206 - DNA, 22 bp, Artificial sequence
  Primer
gggactcgttaacgagtccctg

SEQ ID NO: 8207 - DNA, 22 bp, Artificial sequence
  Primer
aggactcgttaacgagtcctgg

SEQ ID NO: 8208 - DNA, 22 bp, Artificial sequence
  Primer
gagactcgttaacgagtctcgg

SEQ ID NO: 8209 - DNA, 22 bp, Artificial sequence
  Primer
gggactcgttaacgagtcccga

SEQ ID NO: 8210 - DNA, 22 bp, Artificial sequence
  Primer
gggactcgttaacgagtcccag

SEQ ID NO: 8211 - DNA, 22 bp, Artificial sequence
  Primer
tggactcgttaacgagtccagg

SEQ ID NO: 8212 - DNA, 22 bp, Artificial sequence
  Primer
gtgactcgttaacgagtcacgg

SEQ ID NO: 8213 - DNA, 22 bp, Artificial sequence
  Primer
gcgactcgttaacgagtcgccg

SEQ ID NO: 8214 - DNA, 22 bp, Artificial sequence
  Primer
gcgactcgttaacgagtcgctg

SEQ ID NO: 8215 - DNA, 22 bp, Artificial sequence
  Primer
acgactcgttaacgagtcgtcg

SEQ ID NO: 8216 - DNA, 22 bp, Artificial sequence
  Primer
gagactcgttaacgagtctccg

SEQ ID NO: 8217 - DNA, 22 bp, Artificial sequence
  Primer
gcgactcgttaacgagtcgcag

SEQ ID NO: 8218 - DNA, 22 bp, Artificial sequence
  Primer
gtgactcgttaacgagtcaccg

SEQ ID NO: 8219 - DNA, 22 bp, Artificial sequence
  Primer
cggactcgttaacgagtccgtg

SEQ ID NO: 8220 - DNA, 22 bp, Artificial sequence
  Primer
cagactcgttaacgagtctggg

SEQ ID NO: 8221 - DNA, 22 bp, Artificial sequence
  Primer
cggactcgttaacgagtccgag

SEQ ID NO: 8222 - DNA, 22 bp, Artificial sequence
  Primer
ctgactcgttaacgagtcaggg

SEQ ID NO: 8223 - DNA, 22 bp, Artificial sequence
  Primer
acgactcgttaacgagtcgtgg

SEQ ID NO: 8224 - DNA, 22 bp, Artificial sequence
  Primer
ccgactcgttaacgagtcggct

SEQ ID NO: 8225 - DNA, 22 bp, Artificial sequence
  Primer
ccgactcgttaacgagtcggca

SEQ ID NO: 8226 - DNA, 22 bp, Artificial sequence
  Primer
gagactcgttaacgagtctcgc

SEQ ID NO: 8227 - DNA, 22 bp, Artificial sequence
  Primer
gtgactcgttaacgagtcacgc

SEQ ID NO: 8228 - DNA, 22 bp, Artificial sequence
  Primer
aggactcgttaacgagtcctgc

SEQ ID NO: 8229 - DNA, 22 bp, Artificial sequence
  Primer
tggactcgttaacgagtccagc

SEQ ID NO: 8230 - DNA, 22 bp, Artificial sequence
  Primer
aggactcgttaacgagtcctcg

SEQ ID NO: 8231 - DNA, 22 bp, Artificial sequence
  Primer
tggactcgttaacgagtccacg

SEQ ID NO: 8232 - DNA, 22 bp, Artificial sequence
  Primer
ccgactcgttaacgagtcggtg

SEQ ID NO: 8233 - DNA, 22 bp, Artificial sequence
  Primer
ccgactcgttaacgagtcggag

SEQ ID NO: 8234 - DNA, 22 bp, Artificial sequence
  Primer
gggactcgttaacgagtcccgc

SEQ ID NO: 8235 - DNA, 22 bp, Artificial sequence
  Primer
gggactcgttaacgagtccctc

SEQ ID NO: 8236 - DNA, 22 bp, Artificial sequence
  Primer
gggactcgttaacgagtcccac

SEQ ID NO: 8237 - DNA, 22 bp, Artificial sequence
  Primer
  misc_feature (1)..(2): n is a, c, g, or t
  misc_feature (19)..(22): n is a, c, g, or t
nngactcgtgcacgagtcnnnn

SEQ ID NO: 8238 - DNA, 22 bp, Artificial sequence
  Primer
cggactcgtgcacgagtccgcc

SEQ ID NO: 8239 - DNA, 22 bp, Artificial sequence
  Primer
cggactcgtgcacgagtccgct

SEQ ID NO: 8240 - DNA, 22 bp, Artificial sequence
  Primer
cggactcgtgcacgagtccgtc

SEQ ID NO: 8241 - DNA, 22 bp, Artificial sequence
  Primer
aggactcgtgcacgagtcctcc

SEQ ID NO: 8242 - DNA, 22 bp, Artificial sequence
  Primer
cagactcgtgcacgagtctgcc

SEQ ID NO: 8243 - DNA, 22 bp, Artificial sequence
  Primer
cggactcgtgcacgagtccgca

SEQ ID NO: 8244 - DNA, 22 bp, Artificial sequence
  Primer
cggactcgtgcacgagtccgac

SEQ ID NO: 8245 - DNA, 22 bp, Artificial sequence
  Primer
tggactcgtgcacgagtccacc

SEQ ID NO: 8246 - DNA, 22 bp, Artificial sequence
  Primer
ctgactcgtgcacgagtcagcc

SEQ ID NO: 8247 - DNA, 22 bp, Artificial sequence
  Primer
ccgactcgtgcacgagtcgggc

SEQ ID NO: 8248 - DNA, 22 bp, Artificial sequence
  Primer
ccgactcgtgcacgagtcgggt

SEQ ID NO: 8249 - DNA, 22 bp, Artificial sequence
  Primer
ccgactcgtgcacgagtcggtc

SEQ ID NO: 8250 - DNA, 22 bp, Artificial sequence
  Primer
acgactcgtgcacgagtcgtgc

SEQ ID NO: 8251 - DNA, 22 bp, Artificial sequence
  Primer
cagactcgtgcacgagtctggc

SEQ ID NO: 8252 - DNA, 22 bp, Artificial sequence
  Primer
ccgactcgtgcacgagtcggga

SEQ ID NO: 8253 - DNA, 22 bp, Artificial sequence
  Primer
ccgactcgtgcacgagtcggac

SEQ ID NO: 8254 - DNA, 22 bp, Artificial sequence
  Primer
ctgactcgtgcacgagtcaggc

SEQ ID NO: 8255 - DNA, 22 bp, Artificial sequence
  Primer
gcgactcgtgcacgagtcgccc

SEQ ID NO: 8256 - DNA, 22 bp, Artificial sequence
  Primer
gcgactcgtgcacgagtcgcct

SEQ ID NO: 8257 - DNA, 22 bp, Artificial sequence
  Primer
gcgactcgtgcacgagtcgctc

SEQ ID NO: 8258 - DNA, 22 bp, Artificial sequence
  Primer
acgactcgtgcacgagtcgtcc

SEQ ID NO: 8259 - DNA, 22 bp, Artificial sequence
  Primer
gagactcgtgcacgagtctccc

SEQ ID NO: 8260 - DNA, 22 bp, Artificial sequence
  Primer
gcgactcgtgcacgagtcgcca

SEQ ID NO: 8261 - DNA, 22 bp, Artificial sequence
  Primer
gcgactcgtgcacgagtcgcac

SEQ ID NO: 8262 - DNA, 22 bp, Artificial sequence
  Primer
gtgactcgtgcacgagtcaccc

SEQ ID NO: 8263 - DNA, 22 bp, Artificial sequence
  Primer
gggactcgtgcacgagtcccgt

SEQ ID NO: 8264 - DNA, 22 bp, Artificial sequence
  Primer
gggactcgtgcacgagtccctg

SEQ ID NO: 8265 - DNA, 22 bp, Artificial sequence
  Primer
aggactcgtgcacgagtcctgg

SEQ ID NO: 8266 - DNA, 22 bp, Artificial sequence
  Primer
gagactcgtgcacgagtctcgg

SEQ ID NO: 8267 - DNA, 22 bp, Artificial sequence
  Primer
gggactcgtgcacgagtcccga

SEQ ID NO: 8268 - DNA, 22 bp, Artificial sequence
  Primer
gggactcgtgcacgagtcccag

SEQ ID NO: 8269 - DNA, 22 bp, Artificial sequence
  Primer
tggactcgtgcacgagtccagg

SEQ ID NO: 8270 - DNA, 22 bp, Artificial sequence
  Primer
gtgactcgtgcacgagtcacgg

SEQ ID NO: 8271 - DNA, 22 bp, Artificial sequence
  Primer
gcgactcgtgcacgagtcgccg

SEQ ID NO: 8272 - DNA, 22 bp, Artificial sequence
  Primer
gcgactcgtgcacgagtcgctg

SEQ ID NO: 8273 - DNA, 22 bp, Artificial sequence
  Primer
acgactcgtgcacgagtcgtcg

SEQ ID NO: 8274 - DNA, 22 bp, Artificial sequence
  Primer
gagactcgtgcacgagtctccg

SEQ ID NO: 8275 - DNA, 22 bp, Artificial sequence
  Primer
gcgactcgtgcacgagtcgcag

SEQ ID NO: 8276 - DNA, 22 bp, Artificial sequence
  Primer
gtgactcgtgcacgagtcaccg

SEQ ID NO: 8277 - DNA, 22 bp, Artificial sequence
  Primer
cggactcgtgcacgagtccgtg

SEQ ID NO: 8278 - DNA, 22 bp, Artificial sequence
  Primer
cagactcgtgcacgagtctggg

SEQ ID NO: 8279 - DNA, 22 bp, Artificial sequence
  Primer
cggactcgtgcacgagtccgag

SEQ ID NO: 8280 - DNA, 22 bp, Artificial sequence
  Primer
ctgactcgtgcacgagtcaggg

SEQ ID NO: 8281 - DNA, 22 bp, Artificial sequence
  Primer
acgactcgtgcacgagtcgtgg

SEQ ID NO: 8282 - DNA, 22 bp, Artificial sequence
  Primer
ccgactcgtgcacgagtcggct

SEQ ID NO: 8283 - DNA, 22 bp, Artificial sequence
  Primer
ccgactcgtgcacgagtcggca

SEQ ID NO: 8284 - DNA, 22 bp, Artificial sequence
  Primer
gagactcgtgcacgagtctcgc

SEQ ID NO: 8285 - DNA, 22 bp, Artificial sequence
  Primer
gtgactcgtgcacgagtcacgc

SEQ ID NO: 8286 - DNA, 22 bp, Artificial sequence
  Primer
aggactcgtgcacgagtcctgc

SEQ ID NO: 8287 - DNA, 22 bp, Artificial sequence
  Primer
tggactcgtgcacgagtccagc

SEQ ID NO: 8288 - DNA, 22 bp, Artificial sequence
  Primer
aggactcgtgcacgagtcctcg

SEQ ID NO: 8289 - DNA, 22 bp, Artificial sequence
  Primer
tggactcgtgcacgagtccacg

SEQ ID NO: 8290 - DNA, 22 bp, Artificial sequence
  Primer
ccgactcgtgcacgagtcggtg

SEQ ID NO: 8291 - DNA, 22 bp, Artificial sequence
  Primer
ccgactcgtgcacgagtcggag

SEQ ID NO: 8292 - DNA, 22 bp, Artificial sequence
  Primer
gggactcgtgcacgagtcccgc

SEQ ID NO: 8293 - DNA, 22 bp, Artificial sequence
  Primer
gggactcgtgcacgagtccctc

SEQ ID NO: 8294 - DNA, 22 bp, Artificial sequence
  Primer
gggactcgtgcacgagtcccac

SEQ ID NO: 8295 - DNA, 22 bp, Artificial sequence
  Primer
  misc_feature (1)..(2): n is a, c, g, or t
  misc_feature (19)..(22): n is a, c, g, or t
nngactcgtcgacgagtcnnnn

SEQ ID NO: 8296 - DNA, 22 bp, Artificial sequence
  Primer
cggactcgtcgacgagtccgcc

SEQ ID NO: 8297 - DNA, 22 bp, Artificial sequence
  Primer
cggactcgtcgacgagtccgct

SEQ ID NO: 8298 - DNA, 22 bp, Artificial sequence
  Primer
cggactcgtcgacgagtccgtc

SEQ ID NO: 8299 - DNA, 22 bp, Artificial sequence
  Primer
aggactcgtcgacgagtcctcc

SEQ ID NO: 8300 - DNA, 22 bp, Artificial sequence
  Primer
cagactcgtcgacgagtctgcc

SEQ ID NO: 8301 - DNA, 22 bp, Artificial sequence
  Primer
cggactcgtcgacgagtccgca

SEQ ID NO: 8302 - DNA, 22 bp, Artificial sequence
  Primer
cggactcgtcgacgagtccgac

SEQ ID NO: 8303 - DNA, 22 bp, Artificial sequence
  Primer
tggactcgtcgacgagtccacc

SEQ ID NO: 8304 - DNA, 22 bp, Artificial sequence
  Primer
ctgactcgtcgacgagtcagcc

SEQ ID NO: 8305 - DNA, 22 bp, Artificial sequence
  Primer
ccgactcgtcgacgagtcgggc

SEQ ID NO: 8306 - DNA, 22 bp, Artificial sequence
  Primer
ccgactcgtcgacgagtcgggt

SEQ ID NO: 8307 - DNA, 22 bp, Artificial sequence
  Primer
ccgactcgtcgacgagtcggtc

SEQ ID NO: 8308 - DNA, 22 bp, Artificial sequence
  Primer
acgactcgtcgacgagtcgtgc

SEQ ID NO: 8309 - DNA, 22 bp, Artificial sequence
  Primer
cagactcgtcgacgagtctggc

SEQ ID NO: 8310 - DNA, 22 bp, Artificial sequence
  Primer
ccgactcgtcgacgagtcggga

SEQ ID NO: 8311 - DNA, 22 bp, Artificial sequence
  Primer
ccgactcgtcgacgagtcggac

SEQ ID NO: 8312 - DNA, 22 bp, Artificial sequence
  Primer
ctgactcgtcgacgagtcaggc

SEQ ID NO: 8313 - DNA, 22 bp, Artificial sequence
  Primer
gcgactcgtcgacgagtcgccc

SEQ ID NO: 8314 - DNA, 22 bp, Artificial sequence
  Primer
gcgactcgtcgacgagtcgcct

SEQ ID NO: 8315 - DNA, 22 bp, Artificial sequence
  Primer
gcgactcgtcgacgagtcgctc

SEQ ID NO: 8316 - DNA, 22 bp, Artificial sequence
  Primer
acgactcgtcgacgagtcgtcc

SEQ ID NO: 8317 - DNA, 22 bp, Artificial sequence
  Primer
gagactcgtcgacgagtctccc

SEQ ID NO: 8318 - DNA, 22 bp, Artificial sequence
  Primer
gcgactcgtcgacgagtcgcca

SEQ ID NO: 8319 - DNA, 22 bp, Artificial sequence
  Primer
gcgactcgtcgacgagtcgcac

SEQ ID NO: 8320 - DNA, 22 bp, Artificial sequence
  Primer
gtgactcgtcgacgagtcaccc

SEQ ID NO: 8321 - DNA, 22 bp, Artificial sequence
  Primer
gggactcgtcgacgagtcccgt

SEQ ID NO: 8322 - DNA, 22 bp, Artificial sequence
  Primer
gggactcgtcgacgagtccctg

SEQ ID NO: 8323 - DNA, 22 bp, Artificial sequence
  Primer
aggactcgtcgacgagtcctgg

SEQ ID NO: 8324 - DNA, 22 bp, Artificial sequence
  Primer
gagactcgtcgacgagtctcgg

SEQ ID NO: 8325 - DNA, 22 bp, Artificial sequence
  Primer
gggactcgtcgacgagtcccga

SEQ ID NO: 8326 - DNA, 22 bp, Artificial sequence
  Primer
gggactcgtcgacgagtcccag

SEQ ID NO: 8327 - DNA, 22 bp, Artificial sequence
  Primer
tggactcgtcgacgagtccagg

SEQ ID NO: 8328 - DNA, 22 bp, Artificial sequence
  Primer
gtgactcgtcgacgagtcacgg

SEQ ID NO: 8329 - DNA, 22 bp, Artificial sequence
  Primer
gcgactcgtcgacgagtcgccg

SEQ ID NO: 8330 - DNA, 22 bp, Artificial sequence
  Primer
gcgactcgtcgacgagtcgctg

SEQ ID NO: 8331 - DNA, 22 bp, Artificial sequence
  Primer
acgactcgtcgacgagtcgtcg

SEQ ID NO: 8332 - DNA, 22 bp, Artificial sequence
  Primer
gagactcgtcgacgagtctccg

SEQ ID NO: 8333 - DNA, 22 bp, Artificial sequence
  Primer
gcgactcgtcgacgagtcgcag

SEQ ID NO: 8334 - DNA, 22 bp, Artificial sequence
  Primer
gtgactcgtcgacgagtcaccg

SEQ ID NO: 8335 - DNA, 22 bp, Artificial sequence
  Primer
cggactcgtcgacgagtccgtg

SEQ ID NO: 8336 - DNA, 22 bp, Artificial sequence
  Primer
cagactcgtcgacgagtctggg

SEQ ID NO: 8337 - DNA, 22 bp, Artificial sequence
  Primer
cggactcgtcgacgagtccgag

SEQ ID NO: 8338 - DNA, 22 bp, Artificial sequence
  Primer
ctgactcgtcgacgagtcaggg

SEQ ID NO: 8339 - DNA, 22 bp, Artificial sequence
  Primer
acgactcgtcgacgagtcgtgg

SEQ ID NO: 8340 - DNA, 22 bp, Artificial sequence
  Primer
ccgactcgtcgacgagtcggct

SEQ ID NO: 8341 - DNA, 22 bp, Artificial sequence
  Primer
ccgactcgtcgacgagtcggca

SEQ ID NO: 8342 - DNA, 22 bp, Artificial sequence
  Primer
gagactcgtcgacgagtctcgc

SEQ ID NO: 8343 - DNA, 22 bp, Artificial sequence
  Primer
gtgactcgtcgacgagtcacgc

SEQ ID NO: 8344 - DNA, 22 bp, Artificial sequence
  Primer
aggactcgtcgacgagtcctgc

SEQ ID NO: 8345 - DNA, 22 bp, Artificial sequence
  Primer
tggactcgtcgacgagtccagc

SEQ ID NO: 8346 - DNA, 22 bp, Artificial sequence
  Primer
aggactcgtcgacgagtcctcg

SEQ ID NO: 8347 - DNA, 22 bp, Artificial sequence
  Primer
tggactcgtcgacgagtccacg

SEQ ID NO: 8348 - DNA, 22 bp, Artificial sequence
  Primer
ccgactcgtcgacgagtcggtg

SEQ ID NO: 8349 - DNA, 22 bp, Artificial sequence
  Primer
ccgactcgtcgacgagtcggag

SEQ ID NO: 8350 - DNA, 22 bp, Artificial sequence
  Primer
gggactcgtcgacgagtcccgc

SEQ ID NO: 8351 - DNA, 22 bp, Artificial sequence
  Primer
gggactcgtcgacgagtccctc

SEQ ID NO: 8352 - DNA, 22 bp, Artificial sequence
  Primer
gggactcgtcgacgagtcccac

SEQ ID NO: 8353 - DNA, 22 bp, Artificial sequence
  Primer
ccgactcctataggagtcggtc

SEQ ID NO: 8354 - DNA, 22 bp, Artificial sequence
  Primer
acgactcctataggagtcgtgc

SEQ ID NO: 8355 - DNA, 22 bp, Artificial sequence
  Primer
cagactcctataggagtctggc

SEQ ID NO: 8356 - DNA, 22 bp, Artificial sequence
  Primer
ccgactcctataggagtcggga

SEQ ID NO: 8357 - DNA, 22 bp, Artificial sequence
  Primer
ccgactcctataggagtcggac

SEQ ID NO: 8358 - DNA, 22 bp, Artificial sequence
  Primer
ctgactcctataggagtcaggc

SEQ ID NO: 8359 - DNA, 22 bp, Artificial sequence
  Primer
gcgactcctataggagtcgccc

SEQ ID NO: 8360 - DNA, 22 bp, Artificial sequence
  Primer
gcgactcctataggagtcgcct

SEQ ID NO: 8361 - DNA, 22 bp, Artificial sequence
  Primer
gcgactcctataggagtcgctc

SEQ ID NO: 8362 - DNA, 22 bp, Artificial sequence
  Primer
acgactcctataggagtcgtcc

SEQ ID NO: 8363 - DNA, 22 bp, Artificial sequence
  Primer
gagactcctataggagtctccc

SEQ ID NO: 8364 - DNA, 22 bp, Artificial sequence
  Primer
gcgactcctataggagtcgcca

SEQ ID NO: 8365 - DNA, 22 bp, Artificial sequence
  Primer
gcgactcctataggagtcgcac

SEQ ID NO: 8366 - DNA, 22 bp, Artificial sequence
  Primer
gtgactcctataggagtcaccc

SEQ ID NO: 8367 - DNA, 22 bp, Artificial sequence
  Primer
gggactcctataggagtcccgt

SEQ ID NO: 8368 - DNA, 22 bp, Artificial sequence
  Primer
gggactcctataggagtccctg

SEQ ID NO: 8369 - DNA, 22 bp, Artificial sequence
  Primer
aggactcctataggagtcctgg

SEQ ID NO: 8370 - DNA, 22 bp, Artificial sequence
  Primer
gagactcctataggagtctcgg

SEQ ID NO: 8371 - DNA, 22 bp, Artificial sequence
  Primer
gggactcctataggagtcccga

SEQ ID NO: 8372 - DNA, 22 bp, Artificial sequence
  Primer
gggactcctataggagtcccag

SEQ ID NO: 8373 - DNA, 22 bp, Artificial sequence
  Primer
tggactcctataggagtccagg

SEQ ID NO: 8374 - DNA, 22 bp, Artificial sequence
  Primer
gtgactcctataggagtcacgg

SEQ ID NO: 8375 - DNA, 22 bp, Artificial sequence
  Primer
gcgactcctataggagtcgccg

SEQ ID NO: 8376 - DNA, 22 bp, Artificial sequence
  Primer
gcgactcctataggagtcgctg

SEQ ID NO: 8377 - DNA, 22 bp, Artificial sequence
  Primer
acgactcctataggagtcgtcg

SEQ ID NO: 8378 - DNA, 22 bp, Artificial sequence
  Primer
gagactcctataggagtctccg

SEQ ID NO: 8379 - DNA, 22 bp, Artificial sequence
  Primer
gcgactcctataggagtcgcag

SEQ ID NO: 8380 - DNA, 22 bp, Artificial sequence
  Primer
gtgactcctataggagtcaccg

SEQ ID NO: 8381 - DNA, 22 bp, Artificial sequence
  Primer
cggactcctataggagtccgtg

SEQ ID NO: 8382 - DNA, 22 bp, Artificial sequence
  Primer
cagactcctataggagtctggg

SEQ ID NO: 8383 - DNA, 22 bp, Artificial sequence
  Primer
cggactcctataggagtccgag

SEQ ID NO: 8384 - DNA, 22 bp, Artificial sequence
  Primer
ctgactcctataggagtcaggg

SEQ ID NO: 8385 - DNA, 22 bp, Artificial sequence
  Primer
acgactcctataggagtcgtgg

SEQ ID NO: 8386 - DNA, 22 bp, Artificial sequence
  Primer
ccgactcctataggagtcggct

SEQ ID NO: 8387 - DNA, 22 bp, Artificial sequence
  Primer
ccgactcctataggagtcggca

SEQ ID NO: 8388 - DNA, 22 bp, Artificial sequence
  Primer
gagactcctataggagtctcgc

SEQ ID NO: 8389 - DNA, 22 bp, Artificial sequence
  Primer
gtgactcctataggagtcacgc

SEQ ID NO: 8390 - DNA, 22 bp, Artificial sequence
  Primer
aggactcctataggagtcctgc

SEQ ID NO: 8391 - DNA, 22 bp, Artificial sequence
  Primer
tggactcctataggagtccagc

SEQ ID NO: 8392 - DNA, 22 bp, Artificial sequence
  Primer
aggactcctataggagtcctcg

SEQ ID NO: 8393 - DNA, 22 bp, Artificial sequence
  Primer
tggactcctataggagtccacg

SEQ ID NO: 8394 - DNA, 22 bp, Artificial sequence
  Primer
ccgactcctataggagtcggtg

SEQ ID NO: 8395 - DNA, 22 bp, Artificial sequence
  Primer
ccgactcctataggagtcggag

SEQ ID NO: 8396 - DNA, 22 bp, Artificial sequence
  Primer
gggactcctataggagtcccgc

SEQ ID NO: 8397 - DNA, 22 bp, Artificial sequence
  Primer
gggactcctataggagtccctc

SEQ ID NO: 8398 - DNA, 22 bp, Artificial sequence
  Primer
gggactcctataggagtcccac

SEQ ID NO: 8399 - DNA, 22 bp, Artificial sequence
  Primer
  misc_feature (1)..(2): n is a, c, g, or t
  misc_feature (19)..(22): n is a, c, g, or t
nngactccttaaggagtcnnnn

SEQ ID NO: 8400 - DNA, 22 bp, Artificial sequence
  Primer
cggactccttaaggagtccgcc

SEQ ID NO: 8401 - DNA, 22 bp, Artificial sequence
  Primer
cggactccttaaggagtccgct

SEQ ID NO: 8402 - DNA, 22 bp, Artificial sequence
  Primer
cggactccttaaggagtccgtc

SEQ ID NO: 8403 - DNA, 22 bp, Artificial sequence
  Primer
aggactccttaaggagtcctcc

SEQ ID NO: 8404 - DNA, 22 bp, Artificial sequence
  Primer
cagactccttaaggagtctgcc

SEQ ID NO: 8405 - DNA, 22 bp, Artificial sequence
  Primer
cggactccttaaggagtccgca

SEQ ID NO: 8406 - DNA, 22 bp, Artificial sequence
  Primer
cggactccttaaggagtccgac

SEQ ID NO: 8407 - DNA, 22 bp, Artificial sequence
  Primer
tggactccttaaggagtccacc

SEQ ID NO: 8408 - DNA, 22 bp, Artificial sequence
  Primer
ctgactccttaaggagtcagcc

SEQ ID NO: 8409 - DNA, 22 bp, Artificial sequence
  Primer
ccgactccttaaggagtcgggc

SEQ ID NO: 8410 - DNA, 22 bp, Artificial sequence
  Primer
ccgactccttaaggagtcgggt

SEQ ID NO: 8411 - DNA, 22 bp, Artificial sequence
  Primer
ccgactccttaaggagtcggtc

SEQ ID NO: 8412 - DNA, 22 bp, Artificial sequence
  Primer
acgactccttaaggagtcgtgc

SEQ ID NO: 8413 - DNA, 22 bp, Artificial sequence
  Primer
cagactccttaaggagtctggc

SEQ ID NO: 8414 - DNA, 22 bp, Artificial sequence
  Primer
ccgactccttaaggagtcggga

SEQ ID NO: 8415 - DNA, 22 bp, Artificial sequence
  Primer
ccgactccttaaggagtcggac

SEQ ID NO: 8416 - DNA, 22 bp, Artificial sequence
  Primer
ctgactccttaaggagtcaggc

SEQ ID NO: 8417 - DNA, 22 bp, Artificial sequence
  Primer
gcgactccttaaggagtcgccc

SEQ ID NO: 8418 - DNA, 22 bp, Artificial sequence
  Primer
gcgactccttaaggagtcgcct

SEQ ID NO: 8419 - DNA, 22 bp, Artificial sequence
  Primer
gcgactccttaaggagtcgctc

SEQ ID NO: 8420 - DNA, 22 bp, Artificial sequence
  Primer
acgactccttaaggagtcgtcc

SEQ ID NO: 8421 - DNA, 22 bp, Artificial sequence
  Primer
gagactccttaaggagtctccc

SEQ ID NO: 8422 - DNA, 22 bp, Artificial sequence
  Primer
gcgactccttaaggagtcgcca

SEQ ID NO: 8423 - DNA, 22 bp, Artificial sequence
  Primer
gcgactccttaaggagtcgcac

SEQ ID NO: 8424 - DNA, 22 bp, Artificial sequence
  Primer
gtgactccttaaggagtcaccc

SEQ ID NO: 8425 - DNA, 22 bp, Artificial sequence
  Primer
gggactccttaaggagtcccgt

SEQ ID NO: 8426 - DNA, 22 bp, Artificial sequence
  Primer
gggactccttaaggagtccctg

SEQ ID NO: 8427 - DNA, 22 bp, Artificial sequence
  Primer
aggactccttaaggagtcctgg

SEQ ID NO: 8428 - DNA, 22 bp, Artificial sequence
  Primer
gagactccttaaggagtctcgg

SEQ ID NO: 8429 - DNA, 22 bp, Artificial sequence
  Primer
gggactccttaaggagtcccga

SEQ ID NO: 8430 - DNA, 22 bp, Artificial sequence
  Primer
gggactccttaaggagtcccag

SEQ ID NO: 8431 - DNA, 22 bp, Artificial sequence
  Primer
tggactccttaaggagtccagg

SEQ ID NO: 8432 - DNA, 22 bp, Artificial sequence
  Primer
gtgactccttaaggagtcacgg

SEQ ID NO: 8433 - DNA, 22 bp, Artificial sequence
  Primer
gcgactccttaaggagtcgccg

SEQ ID NO: 8434 - DNA, 22 bp, Artificial sequence
  Primer
gcgactccttaaggagtcgctg

SEQ ID NO: 8435 - DNA, 22 bp, Artificial sequence
  Primer
acgactccttaaggagtcgtcg

SEQ ID NO: 8436 - DNA, 22 bp, Artificial sequence
  Primer
gagactccttaaggagtctccg

SEQ ID NO: 8437 - DNA, 22 bp, Artificial sequence
  Primer
gcgactccttaaggagtcgcag

SEQ ID NO: 8438 - DNA, 22 bp, Artificial sequence
  Primer
gtgactccttaaggagtcaccg

SEQ ID NO: 8439 - DNA, 22 bp, Artificial sequence
  Primer
cggactccttaaggagtccgtg

SEQ ID NO: 8440 - DNA, 22 bp, Artificial sequence
  Primer
cagactccttaaggagtctggg

SEQ ID NO: 8441 - DNA, 22 bp, Artificial sequence
  Primer
cggactccttaaggagtccgag

SEQ ID NO: 8442 - DNA, 22 bp, Artificial sequence
  Primer
ctgactccttaaggagtcaggg

SEQ ID NO: 8443 - DNA, 22 bp, Artificial sequence
  Primer
acgactccttaaggagtcgtgg

SEQ ID NO: 8444 - DNA, 22 bp, Artificial sequence
  Primer
ccgactccttaaggagtcggct

SEQ ID NO: 8445 - DNA, 22 bp, Artificial sequence
  Primer
ccgactccttaaggagtcggca

SEQ ID NO: 8446 - DNA, 22 bp, Artificial sequence
  Primer
gagactccttaaggagtctcgc

SEQ ID NO: 8447 - DNA, 22 bp, Artificial sequence
  Primer
gtgactccttaaggagtcacgc

SEQ ID NO: 8448 - DNA, 22 bp, Artificial sequence
  Primer
aggactccttaaggagtcctgc

SEQ ID NO: 8449 - DNA, 22 bp, Artificial sequence
  Primer
tggactccttaaggagtccagc

SEQ ID NO: 8450 - DNA, 22 bp, Artificial sequence
  Primer
aggactccttaaggagtcctcg

SEQ ID NO: 8451 - DNA, 22 bp, Artificial sequence
  Primer
tggactccttaaggagtccacg

SEQ ID NO: 8452 - DNA, 22 bp, Artificial sequence
  Primer
ccgactccttaaggagtcggtg

SEQ ID NO: 8453 - DNA, 22 bp, Artificial sequence
  Primer
ccgactccttaaggagtcggag

SEQ ID NO: 8454 - DNA, 22 bp, Artificial sequence
  Primer
gggactccttaaggagtcccgc

SEQ ID NO: 8455 - DNA, 22 bp, Artificial sequence
  Primer
gggactccttaaggagtccctc

SEQ ID NO: 8456 - DNA, 22 bp, Artificial sequence
  Primer
gggactccttaaggagtcccac

SEQ ID NO: 8457 - DNA, 22 bp, Artificial sequence
  Primer
  misc_feature (1)..(2): n is a, c, g, or t
  misc_feature (19)..(22): n is a, c, g, or t
nngactcctgcaggagtcnnnn

SEQ ID NO: 8458 - DNA, 22 bp, Artificial sequence
  Primer
cggactcctgcaggagtccgcc

SEQ ID NO: 8459 - DNA, 22 bp, Artificial sequence
  Primer
cggactcctgcaggagtccgct

SEQ ID NO: 8460 - DNA, 22 bp, Artificial sequence
  Primer
cggactcctgcaggagtccgtc

SEQ ID NO: 8461 - DNA, 22 bp, Artificial sequence
  Primer
aggactcctgcaggagtcctcc

SEQ ID NO: 8462 - DNA, 22 bp, Artificial sequence
  Primer
cagactcctgcaggagtctgcc

SEQ ID NO: 8463 - DNA, 22 bp, Artificial sequence
  Primer
cggactcctgcaggagtccgca

SEQ ID NO: 8464 - DNA, 22 bp, Artificial sequence
  Primer
cggactcctgcaggagtccgac

SEQ ID NO: 8465 - DNA, 22 bp, Artificial sequence
  Primer
tggactcctgcaggagtccacc

SEQ ID NO: 8466 - DNA, 22 bp, Artificial sequence
  Primer
ctgactcctgcaggagtcagcc

SEQ ID NO: 8467 - DNA, 22 bp, Artificial sequence
  Primer
ccgactcctgcaggagtcgggc

SEQ ID NO: 8468 - DNA, 22 bp, Artificial sequence
  Primer
ccgactcctgcaggagtcgggt

SEQ ID NO: 8469 - DNA, 22 bp, Artificial sequence
  Primer
ccgactcctgcaggagtcggtc

SEQ ID NO: 8470 - DNA, 22 bp, Artificial sequence
  Primer
acgactcctgcaggagtcgtgc

SEQ ID NO: 8471 - DNA, 22 bp, Artificial sequence
  Primer
cagactcctgcaggagtctggc

SEQ ID NO: 8472 - DNA, 22 bp, Artificial sequence
  Primer
ccgactcctgcaggagtcggga

SEQ ID NO: 8473 - DNA, 22 bp, Artificial sequence
  Primer
ccgactcctgcaggagtcggac

SEQ ID NO: 8474 - DNA, 22 bp, Artificial sequence
  Primer
ctgactcctgcaggagtcaggc

SEQ ID NO: 8475 - DNA, 22 bp, Artificial sequence
  Primer
gcgactcctgcaggagtcgccc

SEQ ID NO: 8476 - DNA, 22 bp, Artificial sequence
  Primer
gcgactcctgcaggagtcgcct

SEQ ID NO: 8477 - DNA, 22 bp, Artificial sequence
  Primer
gcgactcctgcaggagtcgctc

SEQ ID NO: 8478 - DNA, 22 bp, Artificial sequence
  Primer
acgactcctgcaggagtcgtcc

SEQ ID NO: 8479 - DNA, 22 bp, Artificial sequence
  Primer
gagactcctgcaggagtctccc

SEQ ID NO: 8480 - DNA, 22 bp, Artificial sequence
  Primer
gcgactcctgcaggagtcgcca

SEQ ID NO: 8481 - DNA, 22 bp, Artificial sequence
  Primer
gcgactcctgcaggagtcgcac

SEQ ID NO: 8482 - DNA, 22 bp, Artificial sequence
  Primer
gtgactcctgcaggagtcaccc

SEQ ID NO: 8483 - DNA, 22 bp, Artificial sequence
  Primer
gggactcctgcaggagtcccgt

SEQ ID NO: 8484 - DNA, 22 bp, Artificial sequence
  Primer
gggactcctgcaggagtccctg

SEQ ID NO: 8485 - DNA, 22 bp, Artificial sequence
  Primer
aggactcctgcaggagtcctgg

SEQ ID NO: 8486 - DNA, 22 bp, Artificial sequence
  Primer
gagactcctgcaggagtctcgg

SEQ ID NO: 8487 - DNA, 22 bp, Artificial sequence
  Primer
gggactcctgcaggagtcccga

SEQ ID NO: 8488 - DNA, 22 bp, Artificial sequence
  Primer
gggactcctgcaggagtcccag

SEQ ID NO: 8489 - DNA, 22 bp, Artificial sequence
  Primer
tggactcctgcaggagtccagg

SEQ ID NO: 8490 - DNA, 22 bp, Artificial sequence
  Primer
gtgactcctgcaggagtcacgg

SEQ ID NO: 8491 - DNA, 22 bp, Artificial sequence
  Primer
gcgactcctgcaggagtcgccg

SEQ ID NO: 8492 - DNA, 22 bp, Artificial sequence
  Primer
gcgactcctgcaggagtcgctg

SEQ ID NO: 8493 - DNA, 22 bp, Artificial sequence
  Primer
acgactcctgcaggagtcgtcg

SEQ ID NO: 8494 - DNA, 22 bp, Artificial sequence
  Primer
gagactcctgcaggagtctccg

SEQ ID NO: 8495 - DNA, 22 bp, Artificial sequence
  Primer
gcgactcctgcaggagtcgcag

SEQ ID NO: 8496 - DNA, 22 bp, Artificial sequence
  Primer
gtgactcctgcaggagtcaccg

SEQ ID NO: 8497 - DNA, 22 bp, Artificial sequence
  Primer
cggactcctgcaggagtccgtg

SEQ ID NO: 8498 - DNA, 22 bp, Artificial sequence
  Primer
cagactcctgcaggagtctggg

SEQ ID NO: 8499 - DNA, 22 bp, Artificial sequence
  Primer
cggactcctgcaggagtccgag

SEQ ID NO: 8500 - DNA, 22 bp, Artificial sequence
  Primer
ctgactcctgcaggagtcaggg

SEQ ID NO: 8501 - DNA, 22 bp, Artificial sequence
  Primer
acgactcctgcaggagtcgtgg

SEQ ID NO: 8502 - DNA, 22 bp, Artificial sequence
  Primer
ccgactcctgcaggagtcggct

SEQ ID NO: 8503 - DNA, 22 bp, Artificial sequence
  Primer
ccgactcctgcaggagtcggca

SEQ ID NO: 8504 - DNA, 22 bp, Artificial sequence
  Primer
gagactcctgcaggagtctcgc

SEQ ID NO: 8505 - DNA, 22 bp, Artificial sequence
  Primer
gtgactcctgcaggagtcacgc

SEQ ID NO: 8506 - DNA, 22 bp, Artificial sequence
  Primer
aggactcctgcaggagtcctgc

SEQ ID NO: 8507 - DNA, 22 bp, Artificial sequence
  Primer
tggactcctgcaggagtccagc

SEQ ID NO: 8508 - DNA, 22 bp, Artificial sequence
  Primer
aggactcctgcaggagtcctcg

SEQ ID NO: 8509 - DNA, 22 bp, Artificial sequence
  Primer
tggactcctgcaggagtccacg

SEQ ID NO: 8510 - DNA, 22 bp, Artificial sequence
  Primer
ccgactcctgcaggagtcggtg

SEQ ID NO: 8511 - DNA, 22 bp, Artificial sequence
  Primer
ccgactcctgcaggagtcggag

SEQ ID NO: 8512 - DNA, 22 bp, Artificial sequence
  Primer
gggactcctgcaggagtcccgc

SEQ ID NO: 8513 - DNA, 22 bp, Artificial sequence
  Primer
gggactcctgcaggagtccctc

SEQ ID NO: 8514 - DNA, 22 bp, Artificial sequence
  Primer
gggactcctgcaggagtcccac

SEQ ID NO: 8515 - DNA, 22 bp, Artificial sequence
  Primer
  misc_feature (1)..(2): n is a, c, g, or t
  misc_feature (19)..(22): n is a, c, g, or t
nngactcctcgaggagtcnnnn

SEQ ID NO: 8516 - DNA, 22 bp, Artificial sequence
  Primer
cggactcctcgaggagtccgcc

SEQ ID NO: 8517 - DNA, 22 bp, Artificial sequence
  Primer
cggactcctcgaggagtccgct

SEQ ID NO: 8518 - DNA, 22 bp, Artificial sequence
  Primer
cggactcctcgaggagtccgtc

SEQ ID NO: 8519 - DNA, 22 bp, Artificial sequence
  Primer
aggactcctcgaggagtcctcc

SEQ ID NO: 8520 - DNA, 22 bp, Artificial sequence
  Primer
cagactcctcgaggagtctgcc

SEQ ID NO: 8521 - DNA, 22 bp, Artificial sequence
  Primer
cggactcctcgaggagtccgca

SEQ ID NO: 8522 - DNA, 22 bp, Artificial sequence
  Primer
cggactcctcgaggagtccgac

SEQ ID NO: 8523 - DNA, 22 bp, Artificial sequence
  Primer
tggactcctcgaggagtccacc

SEQ ID NO: 8524 - DNA, 22 bp, Artificial sequence
  Primer
ctgactcctcgaggagtcagcc

SEQ ID NO: 8525 - DNA, 22 bp, Artificial sequence
  Primer
ccgactcctcgaggagtcgggc

SEQ ID NO: 8526 - DNA, 22 bp, Artificial sequence
  Primer
ccgactcctcgaggagtcgggt

SEQ ID NO: 8527 - DNA, 22 bp, Artificial sequence
  Primer
ccgactcctcgaggagtcggtc

SEQ ID NO: 8528 - DNA, 22 bp, Artificial sequence
  Primer
acgactcctcgaggagtcgtgc

SEQ ID NO: 8529 - DNA, 22 bp, Artificial sequence
  Primer
cagactcctcgaggagtctggc

SEQ ID NO: 8530 - DNA, 22 bp, Artificial sequence
  Primer
ccgactcctcgaggagtcggga

SEQ ID NO: 8531 - DNA, 22 bp, Artificial sequence
  Primer
ccgactcctcgaggagtcggac

SEQ ID NO: 8532 - DNA, 22 bp, Artificial sequence
  Primer
ctgactcctcgaggagtcaggc

SEQ ID NO: 8533 - DNA, 22 bp, Artificial sequence
  Primer
gcgactcctcgaggagtcgccc

SEQ ID NO: 8534 - DNA, 22 bp, Artificial sequence
  Primer
gcgactcctcgaggagtcgcct

SEQ ID NO: 8535 - DNA, 22 bp, Artificial sequence
  Primer
gcgactcctcgaggagtcgctc

SEQ ID NO: 8536 - DNA, 22 bp, Artificial sequence
  Primer
acgactcctcgaggagtcgtcc

SEQ ID NO: 8537 - DNA, 22 bp, Artificial sequence
  Primer
gagactcctcgaggagtctccc

SEQ ID NO: 8538 - DNA, 22 bp, Artificial sequence
  Primer
gcgactcctcgaggagtcgcca

SEQ ID NO: 8539 - DNA, 22 bp, Artificial sequence
  Primer
gcgactcctcgaggagtcgcac

SEQ ID NO: 8540 - DNA, 22 bp, Artificial sequence
  Primer
gtgactcctcgaggagtcaccc

SEQ ID NO: 8541 - DNA, 22 bp, Artificial sequence
  Primer
gggactcctcgaggagtcccgt

SEQ ID NO: 8542 - DNA, 22 bp, Artificial sequence
  Primer
gggactcctcgaggagtccctg

SEQ ID NO: 8543 - DNA, 22 bp, Artificial sequence
  Primer
aggactcctcgaggagtcctgg

SEQ ID NO: 8544 - DNA, 22 bp, Artificial sequence
  Primer
gagactcctcgaggagtctcgg

SEQ ID NO: 8545 - DNA, 22 bp, Artificial sequence
  Primer
gggactcctcgaggagtcccga

SEQ ID NO: 8546 - DNA, 22 bp, Artificial sequence
  Primer
gggactcctcgaggagtcccag

SEQ ID NO: 8547 - DNA, 22 bp, Artificial sequence
  Primer
tggactcctcgaggagtccagg

SEQ ID NO: 8548 - DNA, 22 bp, Artificial sequence
  Primer
gtgactcctcgaggagtcacgg

SEQ ID NO: 8549 - DNA, 22 bp, Artificial sequence
  Primer
gcgactcctcgaggagtcgccg

SEQ ID NO: 8550 - DNA, 22 bp, Artificial sequence
  Primer
gcgactcctcgaggagtcgctg

SEQ ID NO: 8551 - DNA, 22 bp, Artificial sequence
  Primer
acgactcctcgaggagtcgtcg

SEQ ID NO: 8552 - DNA, 22 bp, Artificial sequence
  Primer
gagactcctcgaggagtctccg

SEQ ID NO: 8553 - DNA, 22 bp, Artificial sequence
  Primer
gcgactcctcgaggagtcgcag

SEQ ID NO: 8554 - DNA, 22 bp, Artificial sequence
  Primer
gtgactcctcgaggagtcaccg

SEQ ID NO: 8555 - DNA, 22 bp, Artificial sequence
  Primer
cggactcctcgaggagtccgtg

SEQ ID NO: 8556 - DNA, 22 bp, Artificial sequence
  Primer
cagactcctcgaggagtctggg

SEQ ID NO: 8557 - DNA, 22 bp, Artificial sequence
  Primer
cggactcctcgaggagtccgag

SEQ ID NO: 8558 - DNA, 22 bp, Artificial sequence
  Primer
ctgactcctcgaggagtcaggg

SEQ ID NO: 8559 - DNA, 22 bp, Artificial sequence
  Primer
acgactcctcgaggagtcgtgg

SEQ ID NO: 8560 - DNA, 22 bp, Artificial sequence
  Primer
ccgactcctcgaggagtcggct

SEQ ID NO: 8561 - DNA, 22 bp, Artificial sequence
  Primer
ccgactcctcgaggagtcggca

SEQ ID NO: 8562 - DNA, 22 bp, Artificial sequence
  Primer
gagactcctcgaggagtctcgc

SEQ ID NO: 8563 - DNA, 22 bp, Artificial sequence
  Primer
gtgactcctcgaggagtcacgc

SEQ ID NO: 8564 - DNA, 22 bp, Artificial sequence
  Primer
aggactcctcgaggagtcctgc

SEQ ID NO: 8565 - DNA, 22 bp, Artificial sequence
  Primer
tggactcctcgaggagtccagc

SEQ ID NO: 8566 - DNA, 22 bp, Artificial sequence
  Primer
aggactcctcgaggagtcctcg

SEQ ID NO: 8567 - DNA, 22 bp, Artificial sequence
  Primer
tggactcctcgaggagtccacg

SEQ ID NO: 8568 - DNA, 22 bp, Artificial sequence
  Primer
ccgactcctcgaggagtcggtg

SEQ ID NO: 8569 - DNA, 22 bp, Artificial sequence
  Primer
ccgactcctcgaggagtcggag

SEQ ID NO: 8570 - DNA, 22 bp, Artificial sequence
  Primer
gggactcctcgaggagtcccgc

SEQ ID NO: 8571 - DNA, 22 bp, Artificial sequence
  Primer
gggactcctcgaggagtccctc

SEQ ID NO: 8572 - DNA, 22 bp, Artificial sequence
  Primer
gggactcctcgaggagtcccac

SEQ ID NO: 8573 - DNA, 22 bp, Artificial sequence
  Primer
  misc_feature (1)..(2): n is a, c, g, or t
  misc_feature (19)..(22): n is a, c, g, or t
nngactccaattggagtcnnnn

SEQ ID NO: 8574 - DNA, 22 bp, Artificial sequence
  Primer
cggactccaattggagtccgcc

SEQ ID NO: 8575 - DNA, 22 bp, Artificial sequence
  Primer
cggactccaattggagtccgct

SEQ ID NO: 8576 - DNA, 22 bp, Artificial sequence
  Primer
cggactccaattggagtccgtc

SEQ ID NO: 8577 - DNA, 22 bp, Artificial sequence
  Primer
aggactccaattggagtcctcc

SEQ ID NO: 8578 - DNA, 22 bp, Artificial sequence
  Primer
cagactccaattggagtctgcc

SEQ ID NO: 8579 - DNA, 22 bp, Artificial sequence
  Primer
cggactccaattggagtccgca

SEQ ID NO: 8580 - DNA, 22 bp, Artificial sequence
  Primer
cggactccaattggagtccgac

SEQ ID NO: 8581 - DNA, 22 bp, Artificial sequence
  Primer
tggactccaattggagtccacc

SEQ ID NO: 8582 - DNA, 22 bp, Artificial sequence
  Primer
ctgactccaattggagtcagcc

SEQ ID NO: 8583 - DNA, 22 bp, Artificial sequence
  Primer
ccgactccaattggagtcgggc

SEQ ID NO: 8584 - DNA, 22 bp, Artificial sequence
  Primer
ccgactccaattggagtcgggt

SEQ ID NO: 8585 - DNA, 22 bp, Artificial sequence
  Primer
ccgactccaattggagtcggtc

SEQ ID NO: 8586 - DNA, 22 bp, Artificial sequence
  Primer
acgactccaattggagtcgtgc

SEQ ID NO: 8587 - DNA, 22 bp, Artificial sequence
  Primer
cagactccaattggagtctggc

SEQ ID NO: 8588 - DNA, 22 bp, Artificial sequence
  Primer
ccgactccaattggagtcggga

SEQ ID NO: 8589 - DNA, 22 bp, Artificial sequence
  Primer
ccgactccaattggagtcggac

SEQ ID NO: 8590 - DNA, 22 bp, Artificial sequence
  Primer
ctgactccaattggagtcaggc

SEQ ID NO: 8591 - DNA, 22 bp, Artificial sequence
  Primer
gcgactccaattggagtcgccc

SEQ ID NO: 8592 - DNA, 22 bp, Artificial sequence
  Primer
gcgactccaattggagtcgcct

SEQ ID NO: 8593 - DNA, 22 bp, Artificial sequence
  Primer
gcgactccaattggagtcgctc

SEQ ID NO: 8594 - DNA, 22 bp, Artificial sequence
  Primer
acgactccaattggagtcgtcc

SEQ ID NO: 8595 - DNA, 22 bp, Artificial sequence
  Primer
gagactccaattggagtctccc

SEQ ID NO: 8596 - DNA, 22 bp, Artificial sequence
  Primer
gcgactccaattggagtcgcca

SEQ ID NO: 8597 - DNA, 22 bp, Artificial sequence
  Primer
gcgactccaattggagtcgcac

SEQ ID NO: 8598 - DNA, 22 bp, Artificial sequence
  Primer
gtgactccaattggagtcaccc

SEQ ID NO: 8599 - DNA, 22 bp, Artificial sequence
  Primer
gggactccaattggagtcccgt

SEQ ID NO: 8600 - DNA, 22 bp, Artificial sequence
  Primer
gggactccaattggagtccctg

SEQ ID NO: 8601 - DNA, 22 bp, Artificial sequence
  Primer
aggactccaattggagtcctgg

SEQ ID NO: 8602 - DNA, 22 bp, Artificial sequence
  Primer
gagactccaattggagtctcgg

SEQ ID NO: 8603 - DNA, 22 bp, Artificial sequence
  Primer
gggactccaattggagtcccga

SEQ ID NO: 8604 - DNA, 22 bp, Artificial sequence
  Primer
gggactccaattggagtcccag

SEQ ID NO: 8605 - DNA, 22 bp, Artificial sequence
  Primer
tggactccaattggagtccagg

SEQ ID NO: 8606 - DNA, 22 bp, Artificial sequence
  Primer
gtgactccaattggagtcacgg

SEQ ID NO: 8607 - DNA, 22 bp, Artificial sequence
  Primer
gcgactccaattggagtcgccg

SEQ ID NO: 8608 - DNA, 22 bp, Artificial sequence
  Primer
gcgactccaattggagtcgctg

SEQ ID NO: 8609 - DNA, 22 bp, Artificial sequence
  Primer
acgactccaattggagtcgtcg

SEQ ID NO: 8610 - DNA, 22 bp, Artificial sequence
  Primer
gagactccaattggagtctccg

SEQ ID NO: 8611 - DNA, 22 bp, Artificial sequence
  Primer
gcgactccaattggagtcgcag

SEQ ID NO: 8612 - DNA, 22 bp, Artificial sequence
  Primer
gtgactccaattggagtcaccg

SEQ ID NO: 8613 - DNA, 22 bp, Artificial sequence
  Primer
cggactccaattggagtccgtg

SEQ ID NO: 8614 - DNA, 22 bp, Artificial sequence
  Primer
cagactccaattggagtctggg

SEQ ID NO: 8615 - DNA, 22 bp, Artificial sequence
  Primer
cggactccaattggagtccgag

SEQ ID NO: 8616 - DNA, 22 bp, Artificial sequence
  Primer
ctgactccaattggagtcaggg

SEQ ID NO: 8617 - DNA, 22 bp, Artificial sequence
  Primer
acgactccaattggagtcgtgg

SEQ ID NO: 8618 - DNA, 22 bp, Artificial sequence
  Primer
ccgactccaattggagtcggct

SEQ ID NO: 8619 - DNA, 22 bp, Artificial sequence
  Primer
ccgactccaattggagtcggca

SEQ ID NO: 8620 - DNA, 22 bp, Artificial sequence
  Primer
gagactccaattggagtctcgc

SEQ ID NO: 8621 - DNA, 22 bp, Artificial sequence
  Primer
gtgactccaattggagtcacgc

SEQ ID NO: 8622 - DNA, 22 bp, Artificial sequence
  Primer
aggactccaattggagtcctgc

SEQ ID NO: 8623 - DNA, 22 bp, Artificial sequence
  Primer
tggactccaattggagtccagc

SEQ ID NO: 8624 - DNA, 22 bp, Artificial sequence
  Primer
aggactccaattggagtcctcg

SEQ ID NO: 8625 - DNA, 22 bp, Artificial sequence
  Primer
tggactccaattggagtccacg

SEQ ID NO: 8626 - DNA, 22 bp, Artificial sequence
  Primer
ccgactccaattggagtcggtg

SEQ ID NO: 8627 - DNA, 22 bp, Artificial sequence
  Primer
ccgactccaattggagtcggag

SEQ ID NO: 8628 - DNA, 22 bp, Artificial sequence
  Primer
gggactccaattggagtcccgc

SEQ ID NO: 8629 - DNA, 22 bp, Artificial sequence
  Primer
gggactccaattggagtccctc

SEQ ID NO: 8630 - DNA, 22 bp, Artificial sequence
  Primer
gggactccaattggagtcccac

SEQ ID NO: 8631 - DNA, 22 bp, Artificial sequence
  Primer
  misc_feature (1)..(2): n is a, c, g, or t
  misc_feature (19)..(22): n is a, c, g, or t
nngactccatatggagtcnnnn

SEQ ID NO: 8632 - DNA, 22 bp, Artificial sequence
  Primer
cggactccatatggagtccgcc

SEQ ID NO: 8633 - DNA, 22 bp, Artificial sequence
  Primer
cggactccatatggagtccgct

SEQ ID NO: 8634 - DNA, 22 bp, Artificial sequence
  Primer
cggactccatatggagtccgtc

SEQ ID NO: 8635 - DNA, 22 bp, Artificial sequence
  Primer
aggactccatatggagtcctcc

SEQ ID NO: 8636 - DNA, 22 bp, Artificial sequence
  Primer
cagactccatatggagtctgcc

SEQ ID NO: 8637 - DNA, 22 bp, Artificial sequence
  Primer
cggactccatatggagtccgca

SEQ ID NO: 8638 - DNA, 22 bp, Artificial sequence
  Primer
cggactccatatggagtccgac

SEQ ID NO: 8639 - DNA, 22 bp, Artificial sequence
  Primer
tggactccatatggagtccacc

SEQ ID NO: 8640 - DNA, 22 bp, Artificial sequence
  Primer
ctgactccatatggagtcagcc

SEQ ID NO: 8641 - DNA, 22 bp, Artificial sequence
  Primer
ccgactccatatggagtcgggc

SEQ ID NO: 8642 - DNA, 22 bp, Artificial sequence
  Primer
ccgactccatatggagtcgggt

SEQ ID NO: 8643 - DNA, 22 bp, Artificial sequence
  Primer
ccgactccatatggagtcggtc

SEQ ID NO: 8644 - DNA, 22 bp, Artificial sequence
  Primer
acgactccatatggagtcgtgc

SEQ ID NO: 8645 - DNA, 22 bp, Artificial sequence
  Primer
cagactccatatggagtctggc

SEQ ID NO: 8646 - DNA, 22 bp, Artificial sequence
  Primer
ccgactccatatggagtcggga

SEQ ID NO: 8647 - DNA, 22 bp, Artificial sequence
  Primer
ccgactccatatggagtcggac

SEQ ID NO: 8648 - DNA, 22 bp, Artificial sequence
  Primer
ctgactccatatggagtcaggc

SEQ ID NO: 8649 - DNA, 22 bp, Artificial sequence
  Primer
gcgactccatatggagtcgccc

SEQ ID NO: 8650 - DNA, 22 bp, Artificial sequence
  Primer
gcgactccatatggagtcgcct

SEQ ID NO: 8651 - DNA, 22 bp, Artificial sequence
  Primer
gcgactccatatggagtcgctc

SEQ ID NO: 8652 - DNA, 22 bp, Artificial sequence
  Primer
acgactccatatggagtcgtcc

SEQ ID NO: 8653 - DNA, 22 bp, Artificial sequence
  Primer
gagactccatatggagtctccc

SEQ ID NO: 8654 - DNA, 22 bp, Artificial sequence
  Primer
gcgactccatatggagtcgcca

SEQ ID NO: 8655 - DNA, 22 bp, Artificial sequence
  Primer
gcgactccatatggagtcgcac

SEQ ID NO: 8656 - DNA, 22 bp, Artificial sequence
  Primer
gtgactccatatggagtcaccc

SEQ ID NO: 8657 - DNA, 22 bp, Artificial sequence
  Primer
gggactccatatggagtcccgt

SEQ ID NO: 8658 - DNA, 22 bp, Artificial sequence
  Primer
gggactccatatggagtccctg

SEQ ID NO: 8659 - DNA, 22 bp, Artificial sequence
  Primer
aggactccatatggagtcctgg

SEQ ID NO: 8660 - DNA, 22 bp, Artificial sequence
  Primer
gagactccatatggagtctcgg

SEQ ID NO: 8661 - DNA, 22 bp, Artificial sequence
  Primer
gggactccatatggagtcccga

SEQ ID NO: 8662 - DNA, 22 bp, Artificial sequence
  Primer
gggactccatatggagtcccag

SEQ ID NO: 8663 - DNA, 22 bp, Artificial sequence
  Primer
tggactccatatggagtccagg

SEQ ID NO: 8664 - DNA, 22 bp, Artificial sequence
  Primer
gtgactccatatggagtcacgg

SEQ ID NO: 8665 - DNA, 22 bp, Artificial sequence
  Primer
gcgactccatatggagtcgccg

SEQ ID NO: 8666 - DNA, 22 bp, Artificial sequence
  Primer
gcgactccatatggagtcgctg

SEQ ID NO: 8667 - DNA, 22 bp, Artificial sequence
  Primer
acgactccatatggagtcgtcg

SEQ ID NO: 8668 - DNA, 22 bp, Artificial sequence
  Primer
gagactccatatggagtctccg

SEQ ID NO: 8669 - DNA, 22 bp, Artificial sequence
  Primer
gcgactccatatggagtcgcag

SEQ ID NO: 8670 - DNA, 22 bp, Artificial sequence
  Primer
gtgactccatatggagtcaccg

SEQ ID NO: 8671 - DNA, 22 bp, Artificial sequence
  Primer
cggactccatatggagtccgtg

SEQ ID NO: 8672 - DNA, 22 bp, Artificial sequence
  Primer
cagactccatatggagtctggg

SEQ ID NO: 8673 - DNA, 22 bp, Artificial sequence
  Primer
cggactccatatggagtccgag

SEQ ID NO: 8674 - DNA, 22 bp, Artificial sequence
  Primer
ctgactccatatggagtcaggg

SEQ ID NO: 8675 - DNA, 22 bp, Artificial sequence
  Primer
acgactccatatggagtcgtgg

SEQ ID NO: 8676 - DNA, 22 bp, Artificial sequence
  Primer
ccgactccatatggagtcggct

SEQ ID NO: 8677 - DNA, 22 bp, Artificial sequence
  Primer
ccgactccatatggagtcggca

SEQ ID NO: 8678 - DNA, 22 bp, Artificial sequence
  Primer
gagactccatatggagtctcgc

SEQ ID NO: 8679 - DNA, 22 bp, Artificial sequence
  Primer
gtgactccatatggagtcacgc

SEQ ID NO: 8680 - DNA, 22 bp, Artificial sequence
  Primer
aggactccatatggagtcctgc

SEQ ID NO: 8681 - DNA, 22 bp, Artificial sequence
  Primer
tggactccatatggagtccagc

SEQ ID NO: 8682 - DNA, 22 bp, Artificial sequence
  Primer
aggactccatatggagtcctcg

SEQ ID NO: 8683 - DNA, 22 bp, Artificial sequence
  Primer
tggactccatatggagtccacg

SEQ ID NO: 8684 - DNA, 22 bp, Artificial sequence
  Primer
ccgactccatatggagtcggtg

SEQ ID NO: 8685 - DNA, 22 bp, Artificial sequence
  Primer
ccgactccatatggagtcggag

SEQ ID NO: 8686 - DNA, 22 bp, Artificial sequence
  Primer
gggactccatatggagtcccgc

SEQ ID NO: 8687 - DNA, 22 bp, Artificial sequence
  Primer
gggactccatatggagtccctc

SEQ ID NO: 8688 - DNA, 22 bp, Artificial sequence
  Primer
gggactccatatggagtcccac

SEQ ID NO: 8689 - DNA, 22 bp, Artificial sequence
  Primer
  misc_feature (1)..(2): n is a, c, g, or t
  misc_feature (19)..(22): n is a, c, g, or t
nngactccagctggagtcnnnn

SEQ ID NO: 8690 - DNA, 22 bp, Artificial sequence
  Primer
cggactccagctggagtccgcc

SEQ ID NO: 8691 - DNA, 22 bp, Artificial sequence
  Primer
cggactccagctggagtccgct

SEQ ID NO: 8692 - DNA, 22 bp, Artificial sequence
  Primer
cggactccagctggagtccgtc

SEQ ID NO: 8693 - DNA, 22 bp, Artificial sequence
  Primer
aggactccagctggagtcctcc

SEQ ID NO: 8694 - DNA, 22 bp, Artificial sequence
  Primer
cagactccagctggagtctgcc

SEQ ID NO: 8695 - DNA, 22 bp, Artificial sequence
  Primer
cggactccagctggagtccgca

SEQ ID NO: 8696 - DNA, 22 bp, Artificial sequence
  Primer
cggactccagctggagtccgac

SEQ ID NO: 8697 - DNA, 22 bp, Artificial sequence
  Primer
tggactccagctggagtccacc

SEQ ID NO: 8698 - DNA, 22 bp, Artificial sequence
  Primer
ctgactccagctggagtcagcc

SEQ ID NO: 8699 - DNA, 22 bp, Artificial sequence
  Primer
ccgactccagctggagtcgggc

SEQ ID NO: 8700 - DNA, 22 bp, Artificial sequence
  Primer
ccgactccagctggagtcgggt

SEQ ID NO: 8701 - DNA, 22 bp, Artificial sequence
  Primer
ccgactccagctggagtcggtc

SEQ ID NO: 8702 - DNA, 22 bp, Artificial sequence
  Primer
acgactccagctggagtcgtgc

SEQ ID NO: 8703 - DNA, 22 bp, Artificial sequence
  Primer
cagactccagctggagtctggc

SEQ ID NO: 8704 - DNA, 22 bp, Artificial sequence
  Primer
ccgactccagctggagtcggga

SEQ ID NO: 8705 - DNA, 22 bp, Artificial sequence
  Primer
ccgactccagctggagtcggac

SEQ ID NO: 8706 - DNA, 22 bp, Artificial sequence
  Primer
ctgactccagctggagtcaggc

SEQ ID NO: 8707 - DNA, 22 bp, Artificial sequence
  Primer
gcgactccagctggagtcgccc

SEQ ID NO: 8708 - DNA, 22 bp, Artificial sequence
  Primer
gcgactccagctggagtcgcct

SEQ ID NO: 8709 - DNA, 22 bp, Artificial sequence
  Primer
gcgactccagctggagtcgctc

SEQ ID NO: 8710 - DNA, 22 bp, Artificial sequence
  Primer
acgactccagctggagtcgtcc

SEQ ID NO: 8711 - DNA, 22 bp, Artificial sequence
  Primer
gagactccagctggagtctccc

SEQ ID NO: 8712 - DNA, 22 bp, Artificial sequence
  Primer
gcgactccagctggagtcgcca

SEQ ID NO: 8713 - DNA, 22 bp, Artificial sequence
  Primer
gcgactccagctggagtcgcac

SEQ ID NO: 8714 - DNA, 22 bp, Artificial sequence
  Primer
gtgactccagctggagtcaccc

SEQ ID NO: 8715 - DNA, 22 bp, Artificial sequence
  Primer
gggactccagctggagtcccgt

SEQ ID NO: 8716 - DNA, 22 bp, Artificial sequence
  Primer
gggactccagctggagtccctg

SEQ ID NO: 8717 - DNA, 22 bp, Artificial sequence
  Primer
aggactccagctggagtcctgg

SEQ ID NO: 8718 - DNA, 22 bp, Artificial sequence
  Primer
gagactccagctggagtctcgg

SEQ ID NO: 8719 - DNA, 22 bp, Artificial sequence
  Primer
gggactccagctggagtcccga

SEQ ID NO: 8720 - DNA, 22 bp, Artificial sequence
  Primer
gggactccagctggagtcccag

SEQ ID NO: 8721 - DNA, 22 bp, Artificial sequence
  Primer
tggactccagctggagtccagg

SEQ ID NO: 8722 - DNA, 22 bp, Artificial sequence
  Primer
gtgactccagctggagtcacgg

SEQ ID NO: 8723 - DNA, 22 bp, Artificial sequence
  Primer
gcgactccagctggagtcgccg

SEQ ID NO: 8724 - DNA, 22 bp, Artificial sequence
  Primer
gcgactccagctggagtcgctg

SEQ ID NO: 8725 - DNA, 22 bp, Artificial sequence
  Primer
acgactccagctggagtcgtcg

SEQ ID NO: 8726 - DNA, 22 bp, Artificial sequence
  Primer
gagactccagctggagtctccg

SEQ ID NO: 8727 - DNA, 22 bp, Artificial sequence
  Primer
gcgactccagctggagtcgcag

SEQ ID NO: 8728 - DNA, 22 bp, Artificial sequence
  Primer
gtgactccagctggagtcaccg

SEQ ID NO: 8729 - DNA, 22 bp, Artificial sequence
  Primer
cggactccagctggagtccgtg

SEQ ID NO: 8730 - DNA, 22 bp, Artificial sequence
  Primer
cagactccagctggagtctggg

SEQ ID NO: 8731 - DNA, 22 bp, Artificial sequence
  Primer
cggactccagctggagtccgag

SEQ ID NO: 8732 - DNA, 22 bp, Artificial sequence
  Primer
ctgactccagctggagtcaggg

SEQ ID NO: 8733 - DNA, 22 bp, Artificial sequence
  Primer
acgactccagctggagtcgtgg

SEQ ID NO: 8734 - DNA, 22 bp, Artificial sequence
  Primer
ccgactccagctggagtcggct

SEQ ID NO: 8735 - DNA, 22 bp, Artificial sequence
  Primer
ccgactccagctggagtcggca

SEQ ID NO: 8736 - DNA, 22 bp, Artificial sequence
  Primer
gagactccagctggagtctcgc

SEQ ID NO: 8737 - DNA, 22 bp, Artificial sequence
  Primer
gtgactccagctggagtcacgc

SEQ ID NO: 8738 - DNA, 22 bp, Artificial sequence
  Primer
aggactccagctggagtcctgc

SEQ ID NO: 8739 - DNA, 22 bp, Artificial sequence
  Primer
tggactccagctggagtccagc

SEQ ID NO: 8740 - DNA, 22 bp, Artificial sequence
  Primer
aggactccagctggagtcctcg

SEQ ID NO: 8741 - DNA, 22 bp, Artificial sequence
  Primer
tggactccagctggagtccacg

SEQ ID NO: 8742 - DNA, 22 bp, Artificial sequence
  Primer
ccgactccagctggagtcggtg

SEQ ID NO: 8743 - DNA, 22 bp, Artificial sequence
  Primer
ccgactccagctggagtcggag

SEQ ID NO: 8744 - DNA, 22 bp, Artificial sequence
  Primer
gggactccagctggagtcccgc

SEQ ID NO: 8745 - DNA, 22 bp, Artificial sequence
  Primer
gggactccagctggagtccctc

SEQ ID NO: 8746 - DNA, 22 bp, Artificial sequence
  Primer
gggactccagctggagtcccac

SEQ ID NO: 8747 - DNA, 22 bp, Artificial sequence
  Primer
  misc_feature (1)..(2): n is a, c, g, or t
  misc_feature (19)..(22): n is a, c, g, or t
nngactccacgtggagtcnnnn

SEQ ID NO: 8748 - DNA, 22 bp, Artificial sequence
  Primer
cggactccacgtggagtccgcc

SEQ ID NO: 8749 - DNA, 22 bp, Artificial sequence
  Primer
cggactccacgtggagtccgct

SEQ ID NO: 8750 - DNA, 22 bp, Artificial sequence
  Primer
cggactccacgtggagtccgtc

SEQ ID NO: 8751 - DNA, 22 bp, Artificial sequence
  Primer
aggactccacgtggagtcctcc

SEQ ID NO: 8752 - DNA, 22 bp, Artificial sequence
  Primer
cagactccacgtggagtctgcc

SEQ ID NO: 8753 - DNA, 22 bp, Artificial sequence
  Primer
cggactccacgtggagtccgca

SEQ ID NO: 8754 - DNA, 22 bp, Artificial sequence
  Primer
cggactccacgtggagtccgac

SEQ ID NO: 8755 - DNA, 22 bp, Artificial sequence
  Primer
tggactccacgtggagtccacc

SEQ ID NO: 8756 - DNA, 22 bp, Artificial sequence
  Primer
ctgactccacgtggagtcagcc

SEQ ID NO: 8757 - DNA, 22 bp, Artificial sequence
  Primer
ccgactccacgtggagtcgggc

SEQ ID NO: 8758 - DNA, 22 bp, Artificial sequence
  Primer
ccgactccacgtggagtcgggt

SEQ ID NO: 8759 - DNA, 22 bp, Artificial sequence
  Primer
ccgactccacgtggagtcggtc

SEQ ID NO: 8760 - DNA, 22 bp, Artificial sequence
  Primer
acgactccacgtggagtcgtgc

SEQ ID NO: 8761 - DNA, 22 bp, Artificial sequence
  Primer
cagactccacgtggagtctggc

SEQ ID NO: 8762 - DNA, 22 bp, Artificial sequence
  Primer
ccgactccacgtggagtcggga

SEQ ID NO: 8763 - DNA, 22 bp, Artificial sequence
  Primer
ccgactccacgtggagtcggac

SEQ ID NO: 8764 - DNA, 22 bp, Artificial sequence
  Primer
ctgactccacgtggagtcaggc

SEQ ID NO: 8765 - DNA, 22 bp, Artificial sequence
  Primer
gcgactccacgtggagtcgccc

SEQ ID NO: 8766 - DNA, 22 bp, Artificial sequence
  Primer
gcgactccacgtggagtcgcct

SEQ ID NO: 8767 - DNA, 22 bp, Artificial sequence
  Primer
gcgactccacgtggagtcgctc

SEQ ID NO: 8768 - DNA, 22 bp, Artificial sequence
  Primer
acgactccacgtggagtcgtcc

SEQ ID NO: 8769 - DNA, 22 bp, Artificial sequence
  Primer
gagactccacgtggagtctccc

SEQ ID NO: 8770 - DNA, 22 bp, Artificial sequence
  Primer
gcgactccacgtggagtcgcca

SEQ ID NO: 8771 - DNA, 22 bp, Artificial sequence
  Primer
gcgactccacgtggagtcgcac

SEQ ID NO: 8772 - DNA, 22 bp, Artificial sequence
  Primer
gtgactccacgtggagtcaccc

SEQ ID NO: 8773 - DNA, 22 bp, Artificial sequence
  Primer
gggactccacgtggagtcccgt

SEQ ID NO: 8774 - DNA, 22 bp, Artificial sequence
  Primer
gggactccacgtggagtccctg

SEQ ID NO: 8775 - DNA, 22 bp, Artificial sequence
  Primer
aggactccacgtggagtcctgg

SEQ ID NO: 8776 - DNA, 22 bp, Artificial sequence
  Primer
gagactccacgtggagtctcgg

SEQ ID NO: 8777 - DNA, 22 bp, Artificial sequence
  Primer
gggactccacgtggagtcccga

SEQ ID NO: 8778 - DNA, 22 bp, Artificial sequence
  Primer
gggactccacgtggagtcccag

SEQ ID NO: 8779 - DNA, 22 bp, Artificial sequence
  Primer
tggactccacgtggagtccagg

SEQ ID NO: 8780 - DNA, 22 bp, Artificial sequence
  Primer
gtgactccacgtggagtcacgg

SEQ ID NO: 8781 - DNA, 22 bp, Artificial sequence
  Primer
gcgactccacgtggagtcgccg

SEQ ID NO: 8782 - DNA, 22 bp, Artificial sequence
  Primer
gcgactccacgtggagtcgctg

SEQ ID NO: 8783 - DNA, 22 bp, Artificial sequence
  Primer
acgactccacgtggagtcgtcg

SEQ ID NO: 8784 - DNA, 22 bp, Artificial sequence
  Primer
gagactccacgtggagtctccg

SEQ ID NO: 8785 - DNA, 22 bp, Artificial sequence
  Primer
gcgactccacgtggagtcgcag

SEQ ID NO: 8786 - DNA, 22 bp, Artificial sequence
  Primer
gtgactccacgtggagtcaccg

SEQ ID NO: 8787 - DNA, 22 bp, Artificial sequence
  Primer
cggactccacgtggagtccgtg

SEQ ID NO: 8788 - DNA, 22 bp, Artificial sequence
  Primer
cagactccacgtggagtctggg

SEQ ID NO: 8789 - DNA, 22 bp, Artificial sequence
  Primer
cggactccacgtggagtccgag

SEQ ID NO: 8790 - DNA, 22 bp, Artificial sequence
  Primer
ctgactccacgtggagtcaggg

SEQ ID NO: 8791 - DNA, 22 bp, Artificial sequence
  Primer
acgactccacgtggagtcgtgg

SEQ ID NO: 8792 - DNA, 22 bp, Artificial sequence
  Primer
ccgactccacgtggagtcggct

SEQ ID NO: 8793 - DNA, 22 bp, Artificial sequence
  Primer
ccgactccacgtggagtcggca

SEQ ID NO: 8794 - DNA, 22 bp, Artificial sequence
  Primer
gagactccacgtggagtctcgc

SEQ ID NO: 8795 - DNA, 22 bp, Artificial sequence
  Primer
gtgactccacgtggagtcacgc

SEQ ID NO: 8796 - DNA, 22 bp, Artificial sequence
  Primer
aggactccacgtggagtcctgc

SEQ ID NO: 8797 - DNA, 22 bp, Artificial sequence
  Primer
tggactccacgtggagtccagc

SEQ ID NO: 8798 - DNA, 22 bp, Artificial sequence
  Primer
aggactccacgtggagtcctcg

SEQ ID NO: 8799 - DNA, 22 bp, Artificial sequence
  Primer
tggactccacgtggagtccacg

SEQ ID NO: 8800 - DNA, 22 bp, Artificial sequence
  Primer
ccgactccacgtggagtcggtg

SEQ ID NO: 8801 - DNA, 22 bp, Artificial sequence
  Primer
ccgactccacgtggagtcggag

SEQ ID NO: 8802 - DNA, 22 bp, Artificial sequence
  Primer
gggactccacgtggagtcccgc

SEQ ID NO: 8803 - DNA, 22 bp, Artificial sequence
  Primer
gggactccacgtggagtccctc

SEQ ID NO: 8804 - DNA, 22 bp, Artificial sequence
  Primer
gggactccacgtggagtcccac

SEQ ID NO: 8805 - DNA, 22 bp, Artificial sequence
  Primer
  misc_feature (1)..(2): n is a, c, g, or t
  misc_feature (19)..(22): n is a, c, g, or t
nngactctcatgagagtcnnnn

SEQ ID NO: 8806 - DNA, 22 bp, Artificial sequence
  Primer
cggactctcatgagagtccgcc

SEQ ID NO: 8807 - DNA, 22 bp, Artificial sequence
  Primer
cggactctcatgagagtccgct

SEQ ID NO: 8808 - DNA, 22 bp, Artificial sequence
  Primer
cggactctcatgagagtccgtc

SEQ ID NO: 8809 - DNA, 22 bp, Artificial sequence
  Primer
aggactctcatgagagtcctcc

SEQ ID NO: 8810 - DNA, 22 bp, Artificial sequence
  Primer
cagactctcatgagagtctgcc

SEQ ID NO: 8811 - DNA, 22 bp, Artificial sequence
  Primer
cggactctcatgagagtccgca

SEQ ID NO: 8812 - DNA, 22 bp, Artificial sequence
  Primer
cggactctcatgagagtccgac

SEQ ID NO: 8813 - DNA, 22 bp, Artificial sequence
  Primer
tggactctcatgagagtccacc

SEQ ID NO: 8814 - DNA, 22 bp, Artificial sequence
  Primer
ctgactctcatgagagtcagcc

SEQ ID NO: 8815 - DNA, 22 bp, Artificial sequence
  Primer
ccgactctcatgagagtcgggc

SEQ ID NO: 8816 - DNA, 22 bp, Artificial sequence
  Primer
ccgactctcatgagagtcgggt

SEQ ID NO: 8817 - DNA, 22 bp, Artificial sequence
  Primer
ccgactctcatgagagtcggtc

SEQ ID NO: 8818 - DNA, 22 bp, Artificial sequence
  Primer
acgactctcatgagagtcgtgc

SEQ ID NO: 8819 - DNA, 22 bp, Artificial sequence
  Primer
cagactctcatgagagtctggc

SEQ ID NO: 8820 - DNA, 22 bp, Artificial sequence
  Primer
ccgactctcatgagagtcggga

SEQ ID NO: 8821 - DNA, 22 bp, Artificial sequence
  Primer
ccgactctcatgagagtcggac

SEQ ID NO: 8822 - DNA, 22 bp, Artificial sequence
  Primer
ctgactctcatgagagtcaggc

SEQ ID NO: 8823 - DNA, 22 bp, Artificial sequence
  Primer
gcgactctcatgagagtcgccc

SEQ ID NO: 8824 - DNA, 22 bp, Artificial sequence
  Primer
gcgactctcatgagagtcgcct

SEQ ID NO: 8825 - DNA, 22 bp, Artificial sequence
  Primer
gcgactctcatgagagtcgctc

SEQ ID NO: 8826 - DNA, 22 bp, Artificial sequence
  Primer
acgactctcatgagagtcgtcc

SEQ ID NO: 8827 - DNA, 22 bp, Artificial sequence
  Primer
gagactctcatgagagtctccc

SEQ ID NO: 8828 - DNA, 22 bp, Artificial sequence
  Primer
gcgactctcatgagagtcgcca

SEQ ID NO: 8829 - DNA, 22 bp, Artificial sequence
  Primer
gcgactctcatgagagtcgcac

SEQ ID NO: 8830 - DNA, 22 bp, Artificial sequence
  Primer
gtgactctcatgagagtcaccc

SEQ ID NO: 8831 - DNA, 22 bp, Artificial sequence
  Primer
gggactctcatgagagtcccgt

SEQ ID NO: 8832 - DNA, 22 bp, Artificial sequence
  Primer
gggactctcatgagagtccctg

SEQ ID NO: 8833 - DNA, 22 bp, Artificial sequence
  Primer
aggactctcatgagagtcctgg

SEQ ID NO: 8834 - DNA, 22 bp, Artificial sequence
  Primer
gagactctcatgagagtctcgg

SEQ ID NO: 8835 - DNA, 22 bp, Artificial sequence
  Primer
gggactctcatgagagtcccga

SEQ ID NO: 8836 - DNA, 22 bp, Artificial sequence
  Primer
gggactctcatgagagtcccag

SEQ ID NO: 8837 - DNA, 22 bp, Artificial sequence
  Primer
tggactctcatgagagtccagg

SEQ ID NO: 8838 - DNA, 22 bp, Artificial sequence
  Primer
gtgactctcatgagagtcacgg

SEQ ID NO: 8839 - DNA, 22 bp, Artificial sequence
  Primer
gcgactctcatgagagtcgccg

SEQ ID NO: 8840 - DNA, 22 bp, Artificial sequence
  Primer
gcgactctcatgagagtcgctg

SEQ ID NO: 8841 - DNA, 22 bp, Artificial sequence
  Primer
acgactctcatgagagtcgtcg

SEQ ID NO: 8842 - DNA, 22 bp, Artificial sequence
  Primer
gagactctcatgagagtctccg

SEQ ID NO: 8843 - DNA, 22 bp, Artificial sequence
  Primer
gcgactctcatgagagtcgcag

SEQ ID NO: 8844 - DNA, 22 bp, Artificial sequence
  Primer
gtgactctcatgagagtcaccg

SEQ ID NO: 8845 - DNA, 22 bp, Artificial sequence
  Primer
cggactctcatgagagtccgtg

SEQ ID NO: 8846 - DNA, 22 bp, Artificial sequence
  Primer
cagactctcatgagagtctggg

SEQ ID NO: 8847 - DNA, 22 bp, Artificial sequence
  Primer
cggactctcatgagagtccgag

SEQ ID NO: 8848 - DNA, 22 bp, Artificial sequence
  Primer
ctgactctcatgagagtcaggg

SEQ ID NO: 8849 - DNA, 22 bp, Artificial sequence
  Primer
acgactctcatgagagtcgtgg

SEQ ID NO: 8850 - DNA, 22 bp, Artificial sequence
  Primer
ccgactctcatgagagtcggct

SEQ ID NO: 8851 - DNA, 22 bp, Artificial sequence
  Primer
ccgactctcatgagagtcggca

SEQ ID NO: 8852 - DNA, 22 bp, Artificial sequence
  Primer
gagactctcatgagagtctcgc

SEQ ID NO: 8853 - DNA, 22 bp, Artificial sequence
  Primer
gtgactctcatgagagtcacgc

SEQ ID NO: 8854 - DNA, 22 bp, Artificial sequence
  Primer
aggactctcatgagagtcctgc

SEQ ID NO: 8855 - DNA, 22 bp, Artificial sequence
  Primer
tggactctcatgagagtccagc

SEQ ID NO: 8856 - DNA, 22 bp, Artificial sequence
  Primer
aggactctcatgagagtcctcg

SEQ ID NO: 8857 - DNA, 22 bp, Artificial sequence
  Primer
tggactctcatgagagtccacg

SEQ ID NO: 8858 - DNA, 22 bp, Artificial sequence
  Primer
ccgactctcatgagagtcggtg

SEQ ID NO: 8859 - DNA, 22 bp, Artificial sequence
  Primer
ccgactctcatgagagtcggag

SEQ ID NO: 8860 - DNA, 22 bp, Artificial sequence
  Primer
gggactctcatgagagtcccgc

SEQ ID NO: 8861 - DNA, 22 bp, Artificial sequence
  Primer
gggactctcatgagagtccctc

SEQ ID NO: 8862 - DNA, 22 bp, Artificial sequence
  Primer
gggactctcatgagagtcccac

SEQ ID NO: 8863 - DNA, 22 bp, Artificial sequence
  Primer
  misc_feature (1)..(2): n is a, c, g, or t
  misc_feature (19)..(22): n is a, c, g, or t
nngactctctagagagtcnnnn

SEQ ID NO: 8864 - DNA, 22 bp, Artificial sequence
  Primer
cggactctctagagagtccgcc

SEQ ID NO: 8865 - DNA, 22 bp, Artificial sequence
  Primer
cggactctctagagagtccgct

SEQ ID NO: 8866 - DNA, 22 bp, Artificial sequence
  Primer
cggactctctagagagtccgtc

SEQ ID NO: 8867 - DNA, 22 bp, Artificial sequence
  Primer
aggactctctagagagtcctcc

SEQ ID NO: 8868 - DNA, 22 bp, Artificial sequence
  Primer
cagactctctagagagtctgcc

SEQ ID NO: 8869 - DNA, 22 bp, Artificial sequence
  Primer
cggactctctagagagtccgca

SEQ ID NO: 8870 - DNA, 22 bp, Artificial sequence
  Primer
cggactctctagagagtccgac

SEQ ID NO: 8871 - DNA, 22 bp, Artificial sequence
  Primer
tggactctctagagagtccacc

SEQ ID NO: 8872 - DNA, 22 bp, Artificial sequence
  Primer
ctgactctctagagagtcagcc

SEQ ID NO: 8873 - DNA, 22 bp, Artificial sequence
  Primer
ccgactctctagagagtcgggc

SEQ ID NO: 8874 - DNA, 22 bp, Artificial sequence
  Primer
ccgactctctagagagtcgggt

SEQ ID NO: 8875 - DNA, 22 bp, Artificial sequence
  Primer
ccgactctctagagagtcggtc

SEQ ID NO: 8876 - DNA, 22 bp, Artificial sequence
  Primer
acgactctctagagagtcgtgc

SEQ ID NO: 8877 - DNA, 22 bp, Artificial sequence
  Primer
cagactctctagagagtctggc

SEQ ID NO: 8878 - DNA, 22 bp, Artificial sequence
  Primer
ccgactctctagagagtcggga

SEQ ID NO: 8879 - DNA, 22 bp, Artificial sequence
  Primer
ccgactctctagagagtcggac

SEQ ID NO: 8880 - DNA, 22 bp, Artificial sequence
  Primer
ctgactctctagagagtcaggc

SEQ ID NO: 8881 - DNA, 22 bp, Artificial sequence
  Primer
gcgactctctagagagtcgccc

SEQ ID NO: 8882 - DNA, 22 bp, Artificial sequence
  Primer
gcgactctctagagagtcgcct

SEQ ID NO: 8883 - DNA, 22 bp, Artificial sequence
  Primer
gcgactctctagagagtcgctc

SEQ ID NO: 8884 - DNA, 22 bp, Artificial sequence
  Primer
acgactctctagagagtcgtcc

SEQ ID NO: 8885 - DNA, 22 bp, Artificial sequence
  Primer
gagactctctagagagtctccc

SEQ ID NO: 8886 - DNA, 22 bp, Artificial sequence
  Primer
gcgactctctagagagtcgcca

SEQ ID NO: 8887 - DNA, 22 bp, Artificial sequence
  Primer
gcgactctctagagagtcgcac

SEQ ID NO: 8888 - DNA, 22 bp, Artificial sequence
  Primer
gtgactctctagagagtcaccc

SEQ ID NO: 8889 - DNA, 22 bp, Artificial sequence
  Primer
gggactctctagagagtcccgt

SEQ ID NO: 8890 - DNA, 22 bp, Artificial sequence
  Primer
gggactctctagagagtccctg

SEQ ID NO: 8891 - DNA, 22 bp, Artificial sequence
  Primer
aggactctctagagagtcctgg

SEQ ID NO: 8892 - DNA, 22 bp, Artificial sequence
  Primer
gagactctctagagagtctcgg

SEQ ID NO: 8893 - DNA, 22 bp, Artificial sequence
  Primer
gggactctctagagagtcccga

SEQ ID NO: 8894 - DNA, 22 bp, Artificial sequence
  Primer
gggactctctagagagtcccag

SEQ ID NO: 8895 - DNA, 22 bp, Artificial sequence
  Primer
tggactctctagagagtccagg

SEQ ID NO: 8896 - DNA, 22 bp, Artificial sequence
  Primer
gtgactctctagagagtcacgg

SEQ ID NO: 8897 - DNA, 22 bp, Artificial sequence
  Primer
gcgactctctagagagtcgccg

SEQ ID NO: 8898 - DNA, 22 bp, Artificial sequence
  Primer
gcgactctctagagagtcgctg

SEQ ID NO: 8899 - DNA, 22 bp, Artificial sequence
  Primer
acgactctctagagagtcgtcg

SEQ ID NO: 8900 - DNA, 22 bp, Artificial sequence
  Primer
gagactctctagagagtctccg

SEQ ID NO: 8901 - DNA, 22 bp, Artificial sequence
  Primer
gcgactctctagagagtcgcag

SEQ ID NO: 8902 - DNA, 22 bp, Artificial sequence
  Primer
gtgactctctagagagtcaccg

SEQ ID NO: 8903 - DNA, 22 bp, Artificial sequence
  Primer
cggactctctagagagtccgtg

SEQ ID NO: 8904 - DNA, 22 bp, Artificial sequence
  Primer
cagactctctagagagtctggg

SEQ ID NO: 8905 - DNA, 22 bp, Artificial sequence
  Primer
cggactctctagagagtccgag

SEQ ID NO: 8906 - DNA, 22 bp, Artificial sequence
  Primer
ctgactctctagagagtcaggg

SEQ ID NO: 8907 - DNA, 22 bp, Artificial sequence
  Primer
acgactctctagagagtcgtgg

SEQ ID NO: 8908 - DNA, 22 bp, Artificial sequence
  Primer
ccgactctctagagagtcggct

SEQ ID NO: 8909 - DNA, 22 bp, Artificial sequence
  Primer
ccgactctctagagagtcggca

SEQ ID NO: 8910 - DNA, 22 bp, Artificial sequence
  Primer
gagactctctagagagtctcgc

SEQ ID NO: 8911 - DNA, 22 bp, Artificial sequence
  Primer
gtgactctctagagagtcacgc

SEQ ID NO: 8912 - DNA, 22 bp, Artificial sequence
  Primer
aggactctctagagagtcctgc

SEQ ID NO: 8913 - DNA, 22 bp, Artificial sequence
  Primer
tggactctctagagagtccagc

SEQ ID NO: 8914 - DNA, 22 bp, Artificial sequence
  Primer
aggactctctagagagtcctcg

SEQ ID NO: 8915 - DNA, 22 bp, Artificial sequence
  Primer
tggactctctagagagtccacg

SEQ ID NO: 8916 - DNA, 22 bp, Artificial sequence
  Primer
ccgactctctagagagtcggtg

SEQ ID NO: 8917 - DNA, 22 bp, Artificial sequence
  Primer
ccgactctctagagagtcggag

SEQ ID NO: 8918 - DNA, 22 bp, Artificial sequence
  Primer
gggactctctagagagtcccgc

SEQ ID NO: 8919 - DNA, 22 bp, Artificial sequence
  Primer
gggactctctagagagtccctc

SEQ ID NO: 8920 - DNA, 22 bp, Artificial sequence
  Primer
gggactctctagagagtcccac

SEQ ID NO: 8921 - DNA, 22 bp, Artificial sequence
  Primer
  misc_feature (1)..(2): n is a, c, g, or t
  misc_feature (19)..(22): n is a, c, g, or t
nngactctcgcgagagtcnnnn

SEQ ID NO: 8922 - DNA, 22 bp, Artificial sequence
  Primer
cggactctcgcgagagtccgcc

SEQ ID NO: 8923 - DNA, 22 bp, Artificial sequence
  Primer
cggactctcgcgagagtccgct

SEQ ID NO: 8924 - DNA, 22 bp, Artificial sequence
  Primer
cggactctcgcgagagtccgtc

SEQ ID NO: 8925 - DNA, 22 bp, Artificial sequence
  Primer
aggactctcgcgagagtcctcc

SEQ ID NO: 8926 - DNA, 22 bp, Artificial sequence
  Primer
cagactctcgcgagagtctgcc

SEQ ID NO: 8927 - DNA, 22 bp, Artificial sequence
  Primer
cggactctcgcgagagtccgca

SEQ ID NO: 8928 - DNA, 22 bp, Artificial sequence
  Primer
cggactctcgcgagagtccgac

SEQ ID NO: 8929 - DNA, 22 bp, Artificial sequence
  Primer
tggactctcgcgagagtccacc

SEQ ID NO: 8930 - DNA, 22 bp, Artificial sequence
  Primer
ctgactctcgcgagagtcagcc

SEQ ID NO: 8931 - DNA, 22 bp, Artificial sequence
  Primer
ccgactctcgcgagagtcgggc

SEQ ID NO: 8932 - DNA, 22 bp, Artificial sequence
  Primer
ccgactctcgcgagagtcgggt

SEQ ID NO: 8933 - DNA, 22 bp, Artificial sequence
  Primer
ccgactctcgcgagagtcggtc

SEQ ID NO: 8934 - DNA, 22 bp, Artificial sequence
  Primer
acgactctcgcgagagtcgtgc

SEQ ID NO: 8935 - DNA, 22 bp, Artificial sequence
  Primer
cagactctcgcgagagtctggc

SEQ ID NO: 8936 - DNA, 22 bp, Artificial sequence
  Primer
ccgactctcgcgagagtcggga

SEQ ID NO: 8937 - DNA, 22 bp, Artificial sequence
  Primer
ccgactctcgcgagagtcggac

SEQ ID NO: 8938 - DNA, 22 bp, Artificial sequence
  Primer
ctgactctcgcgagagtcaggc

SEQ ID NO: 8939 - DNA, 22 bp, Artificial sequence
  Primer
gcgactctcgcgagagtcgccc

SEQ ID NO: 8940 - DNA, 22 bp, Artificial sequence
  Primer
gcgactctcgcgagagtcgcct

SEQ ID NO: 8941 - DNA, 22 bp, Artificial sequence
  Primer
gcgactctcgcgagagtcgctc

SEQ ID NO: 8942 - DNA, 22 bp, Artificial sequence
  Primer
acgactctcgcgagagtcgtcc

SEQ ID NO: 8943 - DNA, 22 bp, Artificial sequence
  Primer
gagactctcgcgagagtctccc

SEQ ID NO: 8944 - DNA, 22 bp, Artificial sequence
  Primer
gcgactctcgcgagagtcgcca

SEQ ID NO: 8945 - DNA, 22 bp, Artificial sequence
  Primer
gcgactctcgcgagagtcgcac

SEQ ID NO: 8946 - DNA, 22 bp, Artificial sequence
  Primer
gtgactctcgcgagagtcaccc

SEQ ID NO: 8947 - DNA, 22 bp, Artificial sequence
  Primer
gggactctcgcgagagtcccgt

SEQ ID NO: 8948 - DNA, 22 bp, Artificial sequence
  Primer
gggactctcgcgagagtccctg

SEQ ID NO: 8949 - DNA, 22 bp, Artificial sequence
  Primer
aggactctcgcgagagtcctgg

SEQ ID NO: 8950 - DNA, 22 bp, Artificial sequence
  Primer
gagactctcgcgagagtctcgg

SEQ ID NO: 8951 - DNA, 22 bp, Artificial sequence
  Primer
gggactctcgcgagagtcccga

SEQ ID NO: 8952 - DNA, 22 bp, Artificial sequence
  Primer
gggactctcgcgagagtcccag

SEQ ID NO: 8953 - DNA, 22 bp, Artificial sequence
  Primer
tggactctcgcgagagtccagg

SEQ ID NO: 8954 - DNA, 22 bp, Artificial sequence
  Primer
gtgactctcgcgagagtcacgg

SEQ ID NO: 8955 - DNA, 22 bp, Artificial sequence
  Primer
gcgactctcgcgagagtcgccg

SEQ ID NO: 8956 - DNA, 22 bp, Artificial sequence
  Primer
gcgactctcgcgagagtcgctg

SEQ ID NO: 8957 - DNA, 22 bp, Artificial sequence
  Primer
acgactctcgcgagagtcgtcg

SEQ ID NO: 8958 - DNA, 22 bp, Artificial sequence
  Primer
gagactctcgcgagagtctccg

SEQ ID NO: 8959 - DNA, 22 bp, Artificial sequence
  Primer
gcgactctcgcgagagtcgcag

SEQ ID NO: 8960 - DNA, 22 bp, Artificial sequence
  Primer
gtgactctcgcgagagtcaccg

SEQ ID NO: 8961 - DNA, 22 bp, Artificial sequence
  Primer
cggactctcgcgagagtccgtg

SEQ ID NO: 8962 - DNA, 22 bp, Artificial sequence
  Primer
cagactctcgcgagagtctggg

SEQ ID NO: 8963 - DNA, 22 bp, Artificial sequence
  Primer
cggactctcgcgagagtccgag

SEQ ID NO: 8964 - DNA, 22 bp, Artificial sequence
  Primer
ctgactctcgcgagagtcaggg

SEQ ID NO: 8965 - DNA, 22 bp, Artificial sequence
  Primer
acgactctcgcgagagtcgtgg

SEQ ID NO: 8966 - DNA, 22 bp, Artificial sequence
  Primer
ccgactctcgcgagagtcggct

SEQ ID NO: 8967 - DNA, 22 bp, Artificial sequence
  Primer
ccgactctcgcgagagtcggca

SEQ ID NO: 8968 - DNA, 22 bp, Artificial sequence
  Primer
gagactctcgcgagagtctcgc

SEQ ID NO: 8969 - DNA, 22 bp, Artificial sequence
  Primer
gtgactctcgcgagagtcacgc

SEQ ID NO: 8970 - DNA, 22 bp, Artificial sequence
  Primer
aggactctcgcgagagtcctgc

SEQ ID NO: 8971 - DNA, 22 bp, Artificial sequence
  Primer
tggactctcgcgagagtccagc

SEQ ID NO: 8972 - DNA, 22 bp, Artificial sequence
  Primer
aggactctcgcgagagtcctcg

SEQ ID NO: 8973 - DNA, 22 bp, Artificial sequence
  Primer
tggactctcgcgagagtccacg

SEQ ID NO: 8974 - DNA, 22 bp, Artificial sequence
  Primer
ccgactctcgcgagagtcggtg

SEQ ID NO: 8975 - DNA, 22 bp, Artificial sequence
  Primer
ccgactctcgcgagagtcggag

SEQ ID NO: 8976 - DNA, 22 bp, Artificial sequence
  Primer
gggactctcgcgagagtcccgc

SEQ ID NO: 8977 - DNA, 22 bp, Artificial sequence
  Primer
gggactctcgcgagagtccctc

SEQ ID NO: 8978 - DNA, 22 bp, Artificial sequence
  Primer
gggactctcgcgagagtcccac

SEQ ID NO: 8979 - DNA, 22 bp, Artificial sequence
  Primer
  misc_feature (1)..(2): n is a, c, g, or t
  misc_feature (19)..(22): n is a, c, g, or t
nngactctccggagagtcnnnn

SEQ ID NO: 8980 - DNA, 22 bp, Artificial sequence
  Primer
cggactctccggagagtccgcc

SEQ ID NO: 8981 - DNA, 22 bp, Artificial sequence
  Primer
cggactctccggagagtccgct

SEQ ID NO: 8982 - DNA, 22 bp, Artificial sequence
  Primer
cggactctccggagagtccgtc

SEQ ID NO: 8983 - DNA, 22 bp, Artificial sequence
  Primer
aggactctccggagagtcctcc

SEQ ID NO: 8984 - DNA, 22 bp, Artificial sequence
  Primer
cagactctccggagagtctgcc

SEQ ID NO: 8985 - DNA, 22 bp, Artificial sequence
  Primer
cggactctccggagagtccgca

SEQ ID NO: 8986 - DNA, 22 bp, Artificial sequence
  Primer
cggactctccggagagtccgac

SEQ ID NO: 8987 - DNA, 22 bp, Artificial sequence
  Primer
tggactctccggagagtccacc

SEQ ID NO: 8988 - DNA, 22 bp, Artificial sequence
  Primer
ctgactctccggagagtcagcc

SEQ ID NO: 8989 - DNA, 22 bp, Artificial sequence
  Primer
ccgactctccggagagtcgggc

SEQ ID NO: 8990 - DNA, 22 bp, Artificial sequence
  Primer
ccgactctccggagagtcgggt

SEQ ID NO: 8991 - DNA, 22 bp, Artificial sequence
  Primer
ccgactctccggagagtcggtc

SEQ ID NO: 8992 - DNA, 22 bp, Artificial sequence
  Primer
acgactctccggagagtcgtgc

SEQ ID NO: 8993 - DNA, 22 bp, Artificial sequence
  Primer
cagactctccggagagtctggc

SEQ ID NO: 8994 - DNA, 22 bp, Artificial sequence
  Primer
ccgactctccggagagtcggga

SEQ ID NO: 8995 - DNA, 22 bp, Artificial sequence
  Primer
ccgactctccggagagtcggac

SEQ ID NO: 8996 - DNA, 22 bp, Artificial sequence
  Primer
ctgactctccggagagtcaggc

SEQ ID NO: 8997 - DNA, 22 bp, Artificial sequence
  Primer
gcgactctccggagagtcgccc

SEQ ID NO: 8998 - DNA, 22 bp, Artificial sequence
  Primer
gcgactctccggagagtcgcct

SEQ ID NO: 8999 - DNA, 22 bp, Artificial sequence
  Primer
gcgactctccggagagtcgctc

SEQ ID NO: 9000 - DNA, 22 bp, Artificial sequence
  Primer
acgactctccggagagtcgtcc

SEQ ID NO: 9001 - DNA, 22 bp, Artificial sequence
  Primer
gagactctccggagagtctccc

SEQ ID NO: 9002 - DNA, 22 bp, Artificial sequence
  Primer
gcgactctccggagagtcgcca

SEQ ID NO: 9003 - DNA, 22 bp, Artificial sequence
  Primer
gcgactctccggagagtcgcac

SEQ ID NO: 9004 - DNA, 22 bp, Artificial sequence
  Primer
gtgactctccggagagtcaccc

SEQ ID NO: 9005 - DNA, 22 bp, Artificial sequence
  Primer
gggactctccggagagtcccgt

SEQ ID NO: 9006 - DNA, 22 bp, Artificial sequence
  Primer
gggactctccggagagtccctg

SEQ ID NO: 9007 - DNA, 22 bp, Artificial sequence
  Primer
aggactctccggagagtcctgg

SEQ ID NO: 9008 - DNA, 22 bp, Artificial sequence
  Primer
gagactctccggagagtctcgg

SEQ ID NO: 9009 - DNA, 22 bp, Artificial sequence
  Primer
gggactctccggagagtcccga

SEQ ID NO: 9010 - DNA, 22 bp, Artificial sequence
  Primer
gggactctccggagagtcccag

SEQ ID NO: 9011 - DNA, 22 bp, Artificial sequence
  Primer
tggactctccggagagtccagg

SEQ ID NO: 9012 - DNA, 22 bp, Artificial sequence
  Primer
gtgactctccggagagtcacgg

SEQ ID NO: 9013 - DNA, 22 bp, Artificial sequence
  Primer
gcgactctccggagagtcgccg

SEQ ID NO: 9014 - DNA, 22 bp, Artificial sequence
  Primer
gcgactctccggagagtcgctg

SEQ ID NO: 9015 - DNA, 22 bp, Artificial sequence
  Primer
acgactctccggagagtcgtcg

SEQ ID NO: 9016 - DNA, 22 bp, Artificial sequence
  Primer
gagactctccggagagtctccg

SEQ ID NO: 9017 - DNA, 22 bp, Artificial sequence
  Primer
gcgactctccggagagtcgcag

SEQ ID NO: 9018 - DNA, 22 bp, Artificial sequence
  Primer
gtgactctccggagagtcaccg

SEQ ID NO: 9019 - DNA, 22 bp, Artificial sequence
  Primer
cggactctccggagagtccgtg

SEQ ID NO: 9020 - DNA, 22 bp, Artificial sequence
  Primer
cagactctccggagagtctggg

SEQ ID NO: 9021 - DNA, 22 bp, Artificial sequence
  Primer
cggactctccggagagtccgag

SEQ ID NO: 9022 - DNA, 22 bp, Artificial sequence
  Primer
ctgactctccggagagtcaggg

SEQ ID NO: 9023 - DNA, 22 bp, Artificial sequence
  Primer
acgactctccggagagtcgtgg

SEQ ID NO: 9024 - DNA, 22 bp, Artificial sequence
  Primer
ccgactctccggagagtcggct

SEQ ID NO: 9025 - DNA, 22 bp, Artificial sequence
  Primer
ccgactctccggagagtcggca

SEQ ID NO: 9026 - DNA, 22 bp, Artificial sequence
  Primer
gagactctccggagagtctcgc

SEQ ID NO: 9027 - DNA, 22 bp, Artificial sequence
  Primer
gtgactctccggagagtcacgc

SEQ ID NO: 9028 - DNA, 22 bp, Artificial sequence
  Primer
aggactctccggagagtcctgc

SEQ ID NO: 9029 - DNA, 22 bp, Artificial sequence
  Primer
tggactctccggagagtccagc

SEQ ID NO: 9030 - DNA, 22 bp, Artificial sequence
  Primer
aggactctccggagagtcctcg

SEQ ID NO: 9031 - DNA, 22 bp, Artificial sequence
  Primer
tggactctccggagagtccacg

SEQ ID NO: 9032 - DNA, 22 bp, Artificial sequence
  Primer
ccgactctccggagagtcggtg

SEQ ID NO: 9033 - DNA, 22 bp, Artificial sequence
  Primer
ccgactctccggagagtcggag

SEQ ID NO: 9034 - DNA, 22 bp, Artificial sequence
  Primer
gggactctccggagagtcccgc

SEQ ID NO: 9035 - DNA, 22 bp, Artificial sequence
  Primer
gggactctccggagagtccctc

SEQ ID NO: 9036 - DNA, 22 bp, Artificial sequence
  Primer
gggactctccggagagtcccac

SEQ ID NO: 9037 - DNA, 22 bp, Artificial sequence
  Primer
  misc_feature (1)..(2): n is a, c, g, or t
  misc_feature (19)..(22): n is a, c, g, or t
nngactcagatctgagtcnnnn

SEQ ID NO: 9038 - DNA, 22 bp, Artificial sequence
  Primer
cggactcagatctgagtccgcc

SEQ ID NO: 9039 - DNA, 22 bp, Artificial sequence
  Primer
cggactcagatctgagtccgct

SEQ ID NO: 9040 - DNA, 22 bp, Artificial sequence
  Primer
cggactcagatctgagtccgtc

SEQ ID NO: 9041 - DNA, 22 bp, Artificial sequence
  Primer
aggactcagatctgagtcctcc

SEQ ID NO: 9042 - DNA, 22 bp, Artificial sequence
  Primer
cagactcagatctgagtctgcc

SEQ ID NO: 9043 - DNA, 22 bp, Artificial sequence
  Primer
cggactcagatctgagtccgca

SEQ ID NO: 9044 - DNA, 22 bp, Artificial sequence
  Primer
cggactcagatctgagtccgac

SEQ ID NO: 9045 - DNA, 22 bp, Artificial sequence
  Primer
tggactcagatctgagtccacc

SEQ ID NO: 9046 - DNA, 22 bp, Artificial sequence
  Primer
ctgactcagatctgagtcagcc

SEQ ID NO: 9047 - DNA, 22 bp, Artificial sequence
  Primer
ccgactcagatctgagtcgggc

SEQ ID NO: 9048 - DNA, 22 bp, Artificial sequence
  Primer
ccgactcagatctgagtcgggt

SEQ ID NO: 9049 - DNA, 22 bp, Artificial sequence
  Primer
ccgactcagatctgagtcggtc

SEQ ID NO: 9050 - DNA, 22 bp, Artificial sequence
  Primer
acgactcagatctgagtcgtgc

SEQ ID NO: 9051 - DNA, 22 bp, Artificial sequence
  Primer
cagactcagatctgagtctggc

SEQ ID NO: 9052 - DNA, 22 bp, Artificial sequence
  Primer
ccgactcagatctgagtcggga

SEQ ID NO: 9053 - DNA, 22 bp, Artificial sequence
  Primer
ccgactcagatctgagtcggac

SEQ ID NO: 9054 - DNA, 22 bp, Artificial sequence
  Primer
ctgactcagatctgagtcaggc

SEQ ID NO: 9055 - DNA, 22 bp, Artificial sequence
  Primer
gcgactcagatctgagtcgccc

SEQ ID NO: 9056 - DNA, 22 bp, Artificial sequence
  Primer
gcgactcagatctgagtcgcct

SEQ ID NO: 9057 - DNA, 22 bp, Artificial sequence
  Primer
gcgactcagatctgagtcgctc

SEQ ID NO: 9058 - DNA, 22 bp, Artificial sequence
  Primer
acgactcagatctgagtcgtcc

SEQ ID NO: 9059 - DNA, 22 bp, Artificial sequence
  Primer
gagactcagatctgagtctccc

SEQ ID NO: 9060 - DNA, 22 bp, Artificial sequence
  Primer
gcgactcagatctgagtcgcca

SEQ ID NO: 9061 - DNA, 22 bp, Artificial sequence
  Primer
gcgactcagatctgagtcgcac

SEQ ID NO: 9062 - DNA, 22 bp, Artificial sequence
  Primer
gtgactcagatctgagtcaccc

SEQ ID NO: 9063 - DNA, 22 bp, Artificial sequence
  Primer
gggactcagatctgagtcccgt

SEQ ID NO: 9064 - DNA, 22 bp, Artificial sequence
  Primer
gggactcagatctgagtccctg

SEQ ID NO: 9065 - DNA, 22 bp, Artificial sequence
  Primer
aggactcagatctgagtcctgg

SEQ ID NO: 9066 - DNA, 22 bp, Artificial sequence
  Primer
gagactcagatctgagtctcgg

SEQ ID NO: 9067 - DNA, 22 bp, Artificial sequence
  Primer
gggactcagatctgagtcccga

SEQ ID NO: 9068 - DNA, 22 bp, Artificial sequence
  Primer
gggactcagatctgagtcccag

SEQ ID NO: 9069 - DNA, 22 bp, Artificial sequence
  Primer
tggactcagatctgagtccagg

SEQ ID NO: 9070 - DNA, 22 bp, Artificial sequence
  Primer
gtgactcagatctgagtcacgg

SEQ ID NO: 9071 - DNA, 22 bp, Artificial sequence
  Primer
gcgactcagatctgagtcgccg

SEQ ID NO: 9072 - DNA, 22 bp, Artificial sequence
  Primer
gcgactcagatctgagtcgctg

SEQ ID NO: 9073 - DNA, 22 bp, Artificial sequence
  Primer
acgactcagatctgagtcgtcg

SEQ ID NO: 9074 - DNA, 22 bp, Artificial sequence
  Primer
gagactcagatctgagtctccg

SEQ ID NO: 9075 - DNA, 22 bp, Artificial sequence
  Primer
gcgactcagatctgagtcgcag

SEQ ID NO: 9076 - DNA, 22 bp, Artificial sequence
  Primer
gtgactcagatctgagtcaccg

SEQ ID NO: 9077 - DNA, 22 bp, Artificial sequence
  Primer
cggactcagatctgagtccgtg

SEQ ID NO: 9078 - DNA, 22 bp, Artificial sequence
  Primer
cagactcagatctgagtctggg

SEQ ID NO: 9079 - DNA, 22 bp, Artificial sequence
  Primer
cggactcagatctgagtccgag

SEQ ID NO: 9080 - DNA, 22 bp, Artificial sequence
  Primer
ctgactcagatctgagtcaggg

SEQ ID NO: 9081 - DNA, 22 bp, Artificial sequence
  Primer
acgactcagatctgagtcgtgg

SEQ ID NO: 9082 - DNA, 22 bp, Artificial sequence
  Primer
ccgactcagatctgagtcggct

SEQ ID NO: 9083 - DNA, 22 bp, Artificial sequence
  Primer
ccgactcagatctgagtcggca

SEQ ID NO: 9084 - DNA, 22 bp, Artificial sequence
  Primer
gagactcagatctgagtctcgc

SEQ ID NO: 9085 - DNA, 22 bp, Artificial sequence
  Primer
gtgactcagatctgagtcacgc

SEQ ID NO: 9086 - DNA, 22 bp, Artificial sequence
  Primer
aggactcagatctgagtcctgc

SEQ ID NO: 9087 - DNA, 22 bp, Artificial sequence
  Primer
tggactcagatctgagtccagc

SEQ ID NO: 9088 - DNA, 22 bp, Artificial sequence
  Primer
aggactcagatctgagtcctcg

SEQ ID NO: 9089 - DNA, 22 bp, Artificial sequence
  Primer
tggactcagatctgagtccacg

SEQ ID NO: 9090 - DNA, 22 bp, Artificial sequence
  Primer
ccgactcagatctgagtcggtg

SEQ ID NO: 9091 - DNA, 22 bp, Artificial sequence
  Primer
ccgactcagatctgagtcggag

SEQ ID NO: 9092 - DNA, 22 bp, Artificial sequence
  Primer
gggactcagatctgagtcccgc

SEQ ID NO: 9093 - DNA, 22 bp, Artificial sequence
  Primer
gggactcagatctgagtccctc

SEQ ID NO: 9094 - DNA, 22 bp, Artificial sequence
  Primer
gggactcagatctgagtcccac

SEQ ID NO: 9095 - DNA, 22 bp, Artificial sequence
  Primer
  misc_feature (1)..(2): n is a, c, g, or t
  misc_feature (19)..(22): n is a, c, g, or t
nngactcagtactgagtcnnnn

SEQ ID NO: 9096 - DNA, 22 bp, Artificial sequence
  Primer
cggactcagtactgagtccgcc

SEQ ID NO: 9097 - DNA, 22 bp, Artificial sequence
  Primer
cggactcagtactgagtccgct

SEQ ID NO: 9098 - DNA, 22 bp, Artificial sequence
  Primer
cggactcagtactgagtccgtc

SEQ ID NO: 9099 - DNA, 22 bp, Artificial sequence
  Primer
aggactcagtactgagtcctcc

SEQ ID NO: 9100 - DNA, 22 bp, Artificial sequence
  Primer
cagactcagtactgagtctgcc

SEQ ID NO: 9101 - DNA, 22 bp, Artificial sequence
  Primer
cggactcagtactgagtccgca

SEQ ID NO: 9102 - DNA, 22 bp, Artificial sequence
  Primer
cggactcagtactgagtccgac

SEQ ID NO: 9103 - DNA, 22 bp, Artificial sequence
  Primer
tggactcagtactgagtccacc

SEQ ID NO: 9104 - DNA, 22 bp, Artificial sequence
  Primer
ctgactcagtactgagtcagcc

SEQ ID NO: 9105 - DNA, 22 bp, Artificial sequence
  Primer
ccgactcagtactgagtcgggc

SEQ ID NO: 9106 - DNA, 22 bp, Artificial sequence
  Primer
ccgactcagtactgagtcgggt

SEQ ID NO: 9107 - DNA, 22 bp, Artificial sequence
  Primer
ccgactcagtactgagtcggtc

SEQ ID NO: 9108 - DNA, 22 bp, Artificial sequence
  Primer
acgactcagtactgagtcgtgc

SEQ ID NO: 9109 - DNA, 22 bp, Artificial sequence
  Primer
cagactcagtactgagtctggc

SEQ ID NO: 9110 - DNA, 22 bp, Artificial sequence
  Primer
ccgactcagtactgagtcggga

SEQ ID NO: 9111 - DNA, 22 bp, Artificial sequence
  Primer
ccgactcagtactgagtcggac

SEQ ID NO: 9112 - DNA, 22 bp, Artificial sequence
  Primer
ctgactcagtactgagtcaggc

SEQ ID NO: 9113 - DNA, 22 bp, Artificial sequence
  Primer
gcgactcagtactgagtcgccc

SEQ ID NO: 9114 - DNA, 22 bp, Artificial sequence
  Primer
gcgactcagtactgagtcgcct

SEQ ID NO: 9115 - DNA, 22 bp, Artificial sequence
  Primer
gcgactcagtactgagtcgctc

SEQ ID NO: 9116 - DNA, 22 bp, Artificial sequence
  Primer
acgactcagtactgagtcgtcc

SEQ ID NO: 9117 - DNA, 22 bp, Artificial sequence
  Primer
gagactcagtactgagtctccc

SEQ ID NO: 9118 - DNA, 22 bp, Artificial sequence
  Primer
gcgactcagtactgagtcgcca

SEQ ID NO: 9119 - DNA, 22 bp, Artificial sequence
  Primer
gcgactcagtactgagtcgcac

SEQ ID NO: 9120 - DNA, 22 bp, Artificial sequence
  Primer
gtgactcagtactgagtcaccc

SEQ ID NO: 9121 - DNA, 22 bp, Artificial sequence
  Primer
gggactcagtactgagtcccgt

SEQ ID NO: 9122 - DNA, 22 bp, Artificial sequence
  Primer
gggactcagtactgagtccctg

SEQ ID NO: 9123 - DNA, 22 bp, Artificial sequence
  Primer
aggactcagtactgagtcctgg

SEQ ID NO: 9124 - DNA, 22 bp, Artificial sequence
  Primer
gagactcagtactgagtctcgg

SEQ ID NO: 9125 - DNA, 22 bp, Artificial sequence
  Primer
gggactcagtactgagtcccga

SEQ ID NO: 9126 - DNA, 22 bp, Artificial sequence
  Primer
gggactcagtactgagtcccag

SEQ ID NO: 9127 - DNA, 22 bp, Artificial sequence
  Primer
tggactcagtactgagtccagg

SEQ ID NO: 9128 - DNA, 22 bp, Artificial sequence
  Primer
gtgactcagtactgagtcacgg

SEQ ID NO: 9129 - DNA, 22 bp, Artificial sequence
  Primer
gcgactcagtactgagtcgccg

SEQ ID NO: 9130 - DNA, 22 bp, Artificial sequence
  Primer
gcgactcagtactgagtcgctg

SEQ ID NO: 9131 - DNA, 22 bp, Artificial sequence
  Primer
acgactcagtactgagtcgtcg

SEQ ID NO: 9132 - DNA, 22 bp, Artificial sequence
  Primer
gagactcagtactgagtctccg

SEQ ID NO: 9133 - DNA, 22 bp, Artificial sequence
  Primer
gcgactcagtactgagtcgcag

SEQ ID NO: 9134 - DNA, 22 bp, Artificial sequence
  Primer
gtgactcagtactgagtcaccg

SEQ ID NO: 9135 - DNA, 22 bp, Artificial sequence
  Primer
cggactcagtactgagtccgtg

SEQ ID NO: 9136 - DNA, 22 bp, Artificial sequence
  Primer
cagactcagtactgagtctggg

SEQ ID NO: 9137 - DNA, 22 bp, Artificial sequence
  Primer
cggactcagtactgagtccgag

SEQ ID NO: 9138 - DNA, 22 bp, Artificial sequence
  Primer
ctgactcagtactgagtcaggg

SEQ ID NO: 9139 - DNA, 22 bp, Artificial sequence
  Primer
acgactcagtactgagtcgtgg

SEQ ID NO: 9140 - DNA, 22 bp, Artificial sequence
  Primer
ccgactcagtactgagtcggct

SEQ ID NO: 9141 - DNA, 22 bp, Artificial sequence
  Primer
ccgactcagtactgagtcggca

SEQ ID NO: 9142 - DNA, 22 bp, Artificial sequence
  Primer
gagactcagtactgagtctcgc

SEQ ID NO: 9143 - DNA, 22 bp, Artificial sequence
  Primer
gtgactcagtactgagtcacgc

SEQ ID NO: 9144 - DNA, 22 bp, Artificial sequence
  Primer
aggactcagtactgagtcctgc

SEQ ID NO: 9145 - DNA, 22 bp, Artificial sequence
  Primer
tggactcagtactgagtccagc

SEQ ID NO: 9146 - DNA, 22 bp, Artificial sequence
  Primer
aggactcagtactgagtcctcg

SEQ ID NO: 9147 - DNA, 22 bp, Artificial sequence
  Primer
tggactcagtactgagtccacg

SEQ ID NO: 9148 - DNA, 22 bp, Artificial sequence
  Primer
ccgactcagtactgagtcggtg

SEQ ID NO: 9149 - DNA, 22 bp, Artificial sequence
  Primer
ccgactcagtactgagtcggag

SEQ ID NO: 9150 - DNA, 22 bp, Artificial sequence
  Primer
gggactcagtactgagtcccgc

SEQ ID NO: 9151 - DNA, 22 bp, Artificial sequence
  Primer
gggactcagtactgagtccctc

SEQ ID NO: 9152 - DNA, 22 bp, Artificial sequence
  Primer
gggactcagtactgagtcccac

SEQ ID NO: 9153 - DNA, 22 bp, Artificial sequence
  Primer
  misc_feature (1)..(2): n is a, c, g, or t
  misc_feature (19)..(22): n is a, c, g, or t
nngactcaggcctgagtcnnnn

SEQ ID NO: 9154 - DNA, 22 bp, Artificial sequence
  Primer
cggactcaggcctgagtccgcc

SEQ ID NO: 9155 - DNA, 22 bp, Artificial sequence
  Primer
cggactcaggcctgagtccgct

SEQ ID NO: 9156 - DNA, 22 bp, Artificial sequence
  Primer
cggactcaggcctgagtccgtc

SEQ ID NO: 9157 - DNA, 22 bp, Artificial sequence
  Primer
aggactcaggcctgagtcctcc

SEQ ID NO: 9158 - DNA, 22 bp, Artificial sequence
  Primer
cagactcaggcctgagtctgcc

SEQ ID NO: 9159 - DNA, 22 bp, Artificial sequence
  Primer
cggactcaggcctgagtccgca

SEQ ID NO: 9160 - DNA, 22 bp, Artificial sequence
  Primer
cggactcaggcctgagtccgac

SEQ ID NO: 9161 - DNA, 22 bp, Artificial sequence
  Primer
tggactcaggcctgagtccacc

SEQ ID NO: 9162 - DNA, 22 bp, Artificial sequence
  Primer
ctgactcaggcctgagtcagcc

SEQ ID NO: 9163 - DNA, 22 bp, Artificial sequence
  Primer
ccgactcaggcctgagtcgggc

SEQ ID NO: 9164 - DNA, 22 bp, Artificial sequence
  Primer
ccgactcaggcctgagtcgggt

SEQ ID NO: 9165 - DNA, 22 bp, Artificial sequence
  Primer
ccgactcaggcctgagtcggtc

SEQ ID NO: 9166 - DNA, 22 bp, Artificial sequence
  Primer
acgactcaggcctgagtcgtgc

SEQ ID NO: 9167 - DNA, 22 bp, Artificial sequence
  Primer
cagactcaggcctgagtctggc

SEQ ID NO: 9168 - DNA, 22 bp, Artificial sequence
  Primer
ccgactcaggcctgagtcggga

SEQ ID NO: 9169 - DNA, 22 bp, Artificial sequence
  Primer
ccgactcaggcctgagtcggac

SEQ ID NO: 9170 - DNA, 22 bp, Artificial sequence
  Primer
ctgactcaggcctgagtcaggc

SEQ ID NO: 9171 - DNA, 22 bp, Artificial sequence
  Primer
gcgactcaggcctgagtcgccc

SEQ ID NO: 9172 - DNA, 22 bp, Artificial sequence
  Primer
gcgactcaggcctgagtcgcct

SEQ ID NO: 9173 - DNA, 22 bp, Artificial sequence
  Primer
gcgactcaggcctgagtcgctc

SEQ ID NO: 9174 - DNA, 22 bp, Artificial sequence
  Primer
acgactcaggcctgagtcgtcc

SEQ ID NO: 9175 - DNA, 22 bp, Artificial sequence
  Primer
gagactcaggcctgagtctccc

SEQ ID NO: 9176 - DNA, 22 bp, Artificial sequence
  Primer
gcgactcaggcctgagtcgcca

SEQ ID NO: 9177 - DNA, 22 bp, Artificial sequence
  Primer
gcgactcaggcctgagtcgcac

SEQ ID NO: 9178 - DNA, 22 bp, Artificial sequence
  Primer
gtgactcaggcctgagtcaccc

SEQ ID NO: 9179 - DNA, 22 bp, Artificial sequence
  Primer
gggactcaggcctgagtcccgt

SEQ ID NO: 9180 - DNA, 22 bp, Artificial sequence
  Primer
gggactcaggcctgagtccctg

SEQ ID NO: 9181 - DNA, 22 bp, Artificial sequence
  Primer
aggactcaggcctgagtcctgg

SEQ ID NO: 9182 - DNA, 22 bp, Artificial sequence
  Primer
gagactcaggcctgagtctcgg

SEQ ID NO: 9183 - DNA, 22 bp, Artificial sequence
  Primer
gggactcaggcctgagtcccga

SEQ ID NO: 9184 - DNA, 22 bp, Artificial sequence
  Primer
gggactcaggcctgagtcccag

SEQ ID NO: 9185 - DNA, 22 bp, Artificial sequence
  Primer
tggactcaggcctgagtccagg

SEQ ID NO: 9186 - DNA, 22 bp, Artificial sequence
  Primer
gtgactcaggcctgagtcacgg

SEQ ID NO: 9187 - DNA, 22 bp, Artificial sequence
  Primer
gcgactcaggcctgagtcgccg

SEQ ID NO: 9188 - DNA, 22 bp, Artificial sequence
  Primer
gcgactcaggcctgagtcgctg

SEQ ID NO: 9189 - DNA, 22 bp, Artificial sequence
  Primer
acgactcaggcctgagtcgtcg

SEQ ID NO: 9190 - DNA, 22 bp, Artificial sequence
  Primer
gagactcaggcctgagtctccg

SEQ ID NO: 9191 - DNA, 22 bp, Artificial sequence
  Primer
gcgactcaggcctgagtcgcag

SEQ ID NO: 9192 - DNA, 22 bp, Artificial sequence
  Primer
gtgactcaggcctgagtcaccg

SEQ ID NO: 9193 - DNA, 22 bp, Artificial sequence
  Primer
cggactcaggcctgagtccgtg

SEQ ID NO: 9194 - DNA, 22 bp, Artificial sequence
  Primer
cagactcaggcctgagtctggg

SEQ ID NO: 9195 - DNA, 22 bp, Artificial sequence
  Primer
cggactcaggcctgagtccgag

SEQ ID NO: 9196 - DNA, 22 bp, Artificial sequence
  Primer
ctgactcaggcctgagtcaggg

SEQ ID NO: 9197 - DNA, 22 bp, Artificial sequence
  Primer
acgactcaggcctgagtcgtgg

SEQ ID NO: 9198 - DNA, 22 bp, Artificial sequence
  Primer
ccgactcaggcctgagtcggct

SEQ ID NO: 9199 - DNA, 22 bp, Artificial sequence
  Primer
ccgactcaggcctgagtcggca

SEQ ID NO: 9200 - DNA, 22 bp, Artificial sequence
  Primer
gagactcaggcctgagtctcgc

SEQ ID NO: 9201 - DNA, 22 bp, Artificial sequence
  Primer
gtgactcaggcctgagtcacgc

SEQ ID NO: 9202 - DNA, 22 bp, Artificial sequence
  Primer
aggactcaggcctgagtcctgc

SEQ ID NO: 9203 - DNA, 22 bp, Artificial sequence
  Primer
tggactcaggcctgagtccagc

SEQ ID NO: 9204 - DNA, 22 bp, Artificial sequence
  Primer
aggactcaggcctgagtcctcg

SEQ ID NO: 9205 - DNA, 22 bp, Artificial sequence
  Primer
tggactcaggcctgagtccacg

SEQ ID NO: 9206 - DNA, 22 bp, Artificial sequence
  Primer
ccgactcaggcctgagtcggtg

SEQ ID NO: 9207 - DNA, 22 bp, Artificial sequence
  Primer
ccgactcaggcctgagtcggag

SEQ ID NO: 9208 - DNA, 22 bp, Artificial sequence
  Primer
gggactcaggcctgagtcccgc

SEQ ID NO: 9209 - DNA, 22 bp, Artificial sequence
  Primer
gggactcaggcctgagtccctc

SEQ ID NO: 9210 - DNA, 22 bp, Artificial sequence
  Primer
gggactcaggcctgagtcccac

SEQ ID NO: 9211 - DNA, 22 bp, Artificial sequence
  Primer
  misc_feature (1)..(2): n is a, c, g, or t
  misc_feature (19)..(22): n is a, c, g, or t
nngactcagcgctgagtcnnnn

SEQ ID NO: 9212 - DNA, 22 bp, Artificial sequence
  Primer
cggactcagcgctgagtccgcc

SEQ ID NO: 9213 - DNA, 22 bp, Artificial sequence
  Primer
cggactcagcgctgagtccgct

SEQ ID NO: 9214 - DNA, 22 bp, Artificial sequence
  Primer
cggactcagcgctgagtccgtc

SEQ ID NO: 9215 - DNA, 22 bp, Artificial sequence
  Primer
aggactcagcgctgagtcctcc

SEQ ID NO: 9216 - DNA, 22 bp, Artificial sequence
  Primer
cagactcagcgctgagtctgcc

SEQ ID NO: 9217 - DNA, 22 bp, Artificial sequence
  Primer
cggactcagcgctgagtccgca

SEQ ID NO: 9218 - DNA, 22 bp, Artificial sequence
  Primer
cggactcagcgctgagtccgac

SEQ ID NO: 9219 - DNA, 22 bp, Artificial sequence
  Primer
tggactcagcgctgagtccacc

SEQ ID NO: 9220 - DNA, 22 bp, Artificial sequence
  Primer
ctgactcagcgctgagtcagcc

SEQ ID NO: 9221 - DNA, 22 bp, Artificial sequence
  Primer
ccgactcagcgctgagtcgggc

SEQ ID NO: 9222 - DNA, 22 bp, Artificial sequence
  Primer
ccgactcagcgctgagtcgggt

SEQ ID NO: 9223 - DNA, 22 bp, Artificial sequence
  Primer
ccgactcagcgctgagtcggtc

SEQ ID NO: 9224 - DNA, 22 bp, Artificial sequence
  Primer
acgactcagcgctgagtcgtgc

SEQ ID NO: 9225 - DNA, 22 bp, Artificial sequence
  Primer
cagactcagcgctgagtctggc

SEQ ID NO: 9226 - DNA, 22 bp, Artificial sequence
  Primer
ccgactcagcgctgagtcggga

SEQ ID NO: 9227 - DNA, 22 bp, Artificial sequence
  Primer
ccgactcagcgctgagtcggac

SEQ ID NO: 9228 - DNA, 22 bp, Artificial sequence
  Primer
ctgactcagcgctgagtcaggc

SEQ ID NO: 9229 - DNA, 22 bp, Artificial sequence
  Primer
gcgactcagcgctgagtcgccc

SEQ ID NO: 9230 - DNA, 22 bp, Artificial sequence
  Primer
gcgactcagcgctgagtcgcct

SEQ ID NO: 9231 - DNA, 22 bp, Artificial sequence
  Primer
gcgactcagcgctgagtcgctc

SEQ ID NO: 9232 - DNA, 22 bp, Artificial sequence
  Primer
acgactcagcgctgagtcgtcc

SEQ ID NO: 9233 - DNA, 22 bp, Artificial sequence
  Primer
gagactcagcgctgagtctccc

SEQ ID NO: 9234 - DNA, 22 bp, Artificial sequence
  Primer
gcgactcagcgctgagtcgcca

SEQ ID NO: 9235 - DNA, 22 bp, Artificial sequence
  Primer
gcgactcagcgctgagtcgcac

SEQ ID NO: 9236 - DNA, 22 bp, Artificial sequence
  Primer
gtgactcagcgctgagtcaccc

SEQ ID NO: 9237 - DNA, 22 bp, Artificial sequence
  Primer
gggactcagcgctgagtcccgt

SEQ ID NO: 9238 - DNA, 22 bp, Artificial sequence
  Primer
gggactcagcgctgagtccctg

SEQ ID NO: 9239 - DNA, 22 bp, Artificial sequence
  Primer
aggactcagcgctgagtcctgg

SEQ ID NO: 9240 - DNA, 22 bp, Artificial sequence
  Primer
gagactcagcgctgagtctcgg

SEQ ID NO: 9241 - DNA, 22 bp, Artificial sequence
  Primer
gggactcagcgctgagtcccga

SEQ ID NO: 9242 - DNA, 22 bp, Artificial sequence
  Primer
gggactcagcgctgagtcccag

SEQ ID NO: 9243 - DNA, 22 bp, Artificial sequence
  Primer
tggactcagcgctgagtccagg

SEQ ID NO: 9244 - DNA, 22 bp, Artificial sequence
  Primer
gtgactcagcgctgagtcacgg

SEQ ID NO: 9245 - DNA, 22 bp, Artificial sequence
  Primer
gcgactcagcgctgagtcgccg

SEQ ID NO: 9246 - DNA, 22 bp, Artificial sequence
  Primer
gcgactcagcgctgagtcgctg

SEQ ID NO: 9247 - DNA, 22 bp, Artificial sequence
  Primer
acgactcagcgctgagtcgtcg

SEQ ID NO: 9248 - DNA, 22 bp, Artificial sequence
  Primer
gagactcagcgctgagtctccg

SEQ ID NO: 9249 - DNA, 22 bp, Artificial sequence
  Primer
gcgactcagcgctgagtcgcag

SEQ ID NO: 9250 - DNA, 22 bp, Artificial sequence
  Primer
gtgactcagcgctgagtcaccg

SEQ ID NO: 9251 - DNA, 22 bp, Artificial sequence
  Primer
cggactcagcgctgagtccgtg

SEQ ID NO: 9252 - DNA, 22 bp, Artificial sequence
  Primer
cagactcagcgctgagtctggg

SEQ ID NO: 9253 - DNA, 22 bp, Artificial sequence
  Primer
cggactcagcgctgagtccgag

SEQ ID NO: 9254 - DNA, 22 bp, Artificial sequence
  Primer
ctgactcagcgctgagtcaggg

SEQ ID NO: 9255 - DNA, 22 bp, Artificial sequence
  Primer
acgactcagcgctgagtcgtgg

SEQ ID NO: 9256 - DNA, 22 bp, Artificial sequence
  Primer
ccgactcagcgctgagtcggct

SEQ ID NO: 9257 - DNA, 22 bp, Artificial sequence
  Primer
ccgactcagcgctgagtcggca

SEQ ID NO: 9258 - DNA, 22 bp, Artificial sequence
  Primer
gagactcagcgctgagtctcgc

SEQ ID NO: 9259 - DNA, 22 bp, Artificial sequence
  Primer
gtgactcagcgctgagtcacgc

SEQ ID NO: 9260 - DNA, 22 bp, Artificial sequence
  Primer
aggactcagcgctgagtcctgc

SEQ ID NO: 9261 - DNA, 22 bp, Artificial sequence
  Primer
tggactcagcgctgagtccagc

SEQ ID NO: 9262 - DNA, 22 bp, Artificial sequence
  Primer
aggactcagcgctgagtcctcg

SEQ ID NO: 9263 - DNA, 22 bp, Artificial sequence
  Primer
tggactcagcgctgagtccacg

SEQ ID NO: 9264 - DNA, 22 bp, Artificial sequence
  Primer
ccgactcagcgctgagtcggtg

SEQ ID NO: 9265 - DNA, 22 bp, Artificial sequence
  Primer
ccgactcagcgctgagtcggag

SEQ ID NO: 9266 - DNA, 22 bp, Artificial sequence
  Primer
gggactcagcgctgagtcccgc

SEQ ID NO: 9267 - DNA, 22 bp, Artificial sequence
  Primer
gggactcagcgctgagtccctc

SEQ ID NO: 9268 - DNA, 22 bp, Artificial sequence
  Primer
gggactcagcgctgagtcccac

SEQ ID NO: 9269 - DNA, 22 bp, Artificial sequence
  Primer
  misc_feature (1)..(2): n is a, c, g, or t
  misc_feature (19)..(22): n is a, c, g, or t
nngactcaaatttgagtcnnnn

SEQ ID NO: 9270 - DNA, 22 bp, Artificial sequence
  Primer
cggactcaaatttgagtccgcc

SEQ ID NO: 9271 - DNA, 22 bp, Artificial sequence
  Primer
cggactcaaatttgagtccgct

SEQ ID NO: 9272 - DNA, 22 bp, Artificial sequence
  Primer
cggactcaaatttgagtccgtc

SEQ ID NO: 9273 - DNA, 22 bp, Artificial sequence
  Primer
aggactcaaatttgagtcctcc

SEQ ID NO: 9274 - DNA, 22 bp, Artificial sequence
  Primer
cagactcaaatttgagtctgcc

SEQ ID NO: 9275 - DNA, 22 bp, Artificial sequence
  Primer
cggactcaaatttgagtccgca

SEQ ID NO: 9276 - DNA, 22 bp, Artificial sequence
  Primer
cggactcaaatttgagtccgac

SEQ ID NO: 9277 - DNA, 22 bp, Artificial sequence
  Primer
tggactcaaatttgagtccacc

SEQ ID NO: 9278 - DNA, 22 bp, Artificial sequence
  Primer
ctgactcaaatttgagtcagcc

SEQ ID NO: 9279 - DNA, 22 bp, Artificial sequence
  Primer
ccgactcaaatttgagtcgggc

SEQ ID NO: 9280 - DNA, 22 bp, Artificial sequence
  Primer
ccgactcaaatttgagtcgggt

SEQ ID NO: 9281 - DNA, 22 bp, Artificial sequence
  Primer
ccgactcaaatttgagtcggtc

SEQ ID NO: 9282 - DNA, 22 bp, Artificial sequence
  Primer
acgactcaaatttgagtcgtgc

SEQ ID NO: 9283 - DNA, 22 bp, Artificial sequence
  Primer
cagactcaaatttgagtctggc

SEQ ID NO: 9284 - DNA, 22 bp, Artificial sequence
  Primer
ccgactcaaatttgagtcggga

SEQ ID NO: 9285 - DNA, 22 bp, Artificial sequence
  Primer
ccgactcaaatttgagtcggac

SEQ ID NO: 9286 - DNA, 22 bp, Artificial sequence
  Primer
ctgactcaaatttgagtcaggc

SEQ ID NO: 9287 - DNA, 22 bp, Artificial sequence
  Primer
gcgactcaaatttgagtcgccc

SEQ ID NO: 9288 - DNA, 22 bp, Artificial sequence
  Primer
gcgactcaaatttgagtcgcct

SEQ ID NO: 9289 - DNA, 22 bp, Artificial sequence
  Primer
gcgactcaaatttgagtcgctc

SEQ ID NO: 9290 - DNA, 22 bp, Artificial sequence
  Primer
acgactcaaatttgagtcgtcc

SEQ ID NO: 9291 - DNA, 22 bp, Artificial sequence
  Primer
gagactcaaatttgagtctccc

SEQ ID NO: 9292 - DNA, 22 bp, Artificial sequence
  Primer
gcgactcaaatttgagtcgcca

SEQ ID NO: 9293 - DNA, 22 bp, Artificial sequence
  Primer
gcgactcaaatttgagtcgcac

SEQ ID NO: 9294 - DNA, 22 bp, Artificial sequence
  Primer
gtgactcaaatttgagtcaccc

SEQ ID NO: 9295 - DNA, 22 bp, Artificial sequence
  Primer
gggactcaaatttgagtcccgt

SEQ ID NO: 9296 - DNA, 22 bp, Artificial sequence
  Primer
gggactcaaatttgagtccctg

SEQ ID NO: 9297 - DNA, 22 bp, Artificial sequence
  Primer
aggactcaaatttgagtcctgg

SEQ ID NO: 9298 - DNA, 22 bp, Artificial sequence
  Primer
gagactcaaatttgagtctcgg

SEQ ID NO: 9299 - DNA, 22 bp, Artificial sequence
  Primer
gggactcaaatttgagtcccga

SEQ ID NO: 9300 - DNA, 22 bp, Artificial sequence
  Primer
gggactcaaatttgagtcccag

SEQ ID NO: 9301 - DNA, 22 bp, Artificial sequence
  Primer
tggactcaaatttgagtccagg

SEQ ID NO: 9302 - DNA, 22 bp, Artificial sequence
  Primer
gtgactcaaatttgagtcacgg

SEQ ID NO: 9303 - DNA, 22 bp, Artificial sequence
  Primer
gcgactcaaatttgagtcgccg

SEQ ID NO: 9304 - DNA, 22 bp, Artificial sequence
  Primer
gcgactcaaatttgagtcgctg

SEQ ID NO: 9305 - DNA, 22 bp, Artificial sequence
  Primer
acgactcaaatttgagtcgtcg

SEQ ID NO: 9306 - DNA, 22 bp, Artificial sequence
  Primer
gagactcaaatttgagtctccg

SEQ ID NO: 9307 - DNA, 22 bp, Artificial sequence
  Primer
gcgactcaaatttgagtcgcag

SEQ ID NO: 9308 - DNA, 22 bp, Artificial sequence
  Primer
gtgactcaaatttgagtcaccg

SEQ ID NO: 9309 - DNA, 22 bp, Artificial sequence
  Primer
cggactcaaatttgagtccgtg

SEQ ID NO: 9310 - DNA, 22 bp, Artificial sequence
  Primer
cagactcaaatttgagtctggg

SEQ ID NO: 9311 - DNA, 22 bp, Artificial sequence
  Primer
cggactcaaatttgagtccgag

SEQ ID NO: 9312 - DNA, 22 bp, Artificial sequence
  Primer
ctgactcaaatttgagtcaggg

SEQ ID NO: 9313 - DNA, 22 bp, Artificial sequence
  Primer
acgactcaaatttgagtcgtgg

SEQ ID NO: 9314 - DNA, 22 bp, Artificial sequence
  Primer
ccgactcaaatttgagtcggct

SEQ ID NO: 9315 - DNA, 22 bp, Artificial sequence
  Primer
ccgactcaaatttgagtcggca

SEQ ID NO: 9316 - DNA, 22 bp, Artificial sequence
  Primer
gagactcaaatttgagtctcgc

SEQ ID NO: 9317 - DNA, 22 bp, Artificial sequence
  Primer
gtgactcaaatttgagtcacgc

SEQ ID NO: 9318 - DNA, 22 bp, Artificial sequence
  Primer
aggactcaaatttgagtcctgc

SEQ ID NO: 9319 - DNA, 22 bp, Artificial sequence
  Primer
tggactcaaatttgagtccagc

SEQ ID NO: 9320 - DNA, 22 bp, Artificial sequence
  Primer
aggactcaaatttgagtcctcg

SEQ ID NO: 9321 - DNA, 22 bp, Artificial sequence
  Primer
tggactcaaatttgagtccacg

SEQ ID NO: 9322 - DNA, 22 bp, Artificial sequence
  Primer
ccgactcaaatttgagtcggtg

SEQ ID NO: 9323 - DNA, 22 bp, Artificial sequence
  Primer
ccgactcaaatttgagtcggag

SEQ ID NO: 9324 - DNA, 22 bp, Artificial sequence
  Primer
gggactcaaatttgagtcccgc

SEQ ID NO: 9325 - DNA, 22 bp, Artificial sequence
  Primer
gggactcaaatttgagtccctc

SEQ ID NO: 9326 - DNA, 22 bp, Artificial sequence
  Primer
gggactcaaatttgagtcccac

SEQ ID NO: 9327 - DNA, 22 bp, Artificial sequence
  Primer
  misc_feature (1)..(2): n is a, c, g, or t
  misc_feature (19)..(22): n is a, c, g, or t
nngactcaatattgagtcnnnn

SEQ ID NO: 9328 - DNA, 22 bp, Artificial sequence
  Primer
cggactcaatattgagtccgcc

SEQ ID NO: 9329 - DNA, 22 bp, Artificial sequence
  Primer
cggactcaatattgagtccgct

SEQ ID NO: 9330 - DNA, 22 bp, Artificial sequence
  Primer
cggactcaatattgagtccgtc

SEQ ID NO: 9331 - DNA, 22 bp, Artificial sequence
  Primer
aggactcaatattgagtcctcc

SEQ ID NO: 9332 - DNA, 22 bp, Artificial sequence
  Primer
cagactcaatattgagtctgcc

SEQ ID NO: 9333 - DNA, 22 bp, Artificial sequence
  Primer
cggactcaatattgagtccgca

SEQ ID NO: 9334 - DNA, 22 bp, Artificial sequence
  Primer
cggactcaatattgagtccgac

SEQ ID NO: 9335 - DNA, 22 bp, Artificial sequence
  Primer
tggactcaatattgagtccacc

SEQ ID NO: 9336 - DNA, 22 bp, Artificial sequence
  Primer
ctgactcaatattgagtcagcc

SEQ ID NO: 9337 - DNA, 22 bp, Artificial sequence
  Primer
ccgactcaatattgagtcgggc

SEQ ID NO: 9338 - DNA, 22 bp, Artificial sequence
  Primer
ccgactcaatattgagtcgggt

SEQ ID NO: 9339 - DNA, 22 bp, Artificial sequence
  Primer
ccgactcaatattgagtcggtc

SEQ ID NO: 9340 - DNA, 22 bp, Artificial sequence
  Primer
acgactcaatattgagtcgtgc

SEQ ID NO: 9341 - DNA, 22 bp, Artificial sequence
  Primer
cagactcaatattgagtctggc

SEQ ID NO: 9342 - DNA, 22 bp, Artificial sequence
  Primer
ccgactcaatattgagtcggga

SEQ ID NO: 9343 - DNA, 22 bp, Artificial sequence
  Primer
ccgactcaatattgagtcggac

SEQ ID NO: 9344 - DNA, 22 bp, Artificial sequence
  Primer
ctgactcaatattgagtcaggc

SEQ ID NO: 9345 - DNA, 22 bp, Artificial sequence
  Primer
gcgactcaatattgagtcgccc

SEQ ID NO: 9346 - DNA, 22 bp, Artificial sequence
  Primer
gcgactcaatattgagtcgcct

SEQ ID NO: 9347 - DNA, 22 bp, Artificial sequence
  Primer
gcgactcaatattgagtcgctc

SEQ ID NO: 9348 - DNA, 22 bp, Artificial sequence
  Primer
acgactcaatattgagtcgtcc

SEQ ID NO: 9349 - DNA, 22 bp, Artificial sequence
  Primer
gagactcaatattgagtctccc

SEQ ID NO: 9350 - DNA, 22 bp, Artificial sequence
  Primer
gcgactcaatattgagtcgcca

SEQ ID NO: 9351 - DNA, 22 bp, Artificial sequence
  Primer
gcgactcaatattgagtcgcac

SEQ ID NO: 9352 - DNA, 22 bp, Artificial sequence
  Primer
gtgactcaatattgagtcaccc

SEQ ID NO: 9353 - DNA, 22 bp, Artificial sequence
  Primer
gggactcaatattgagtcccgt

SEQ ID NO: 9354 - DNA, 22 bp, Artificial sequence
  Primer
gggactcaatattgagtccctg

SEQ ID NO: 9355 - DNA, 22 bp, Artificial sequence
  Primer
aggactcaatattgagtcctgg

SEQ ID NO: 9356 - DNA, 22 bp, Artificial sequence
  Primer
gagactcaatattgagtctcgg

SEQ ID NO: 9357 - DNA, 22 bp, Artificial sequence
  Primer
gggactcaatattgagtcccga

SEQ ID NO: 9358 - DNA, 22 bp, Artificial sequence
  Primer
gggactcaatattgagtcccag

SEQ ID NO: 9359 - DNA, 22 bp, Artificial sequence
  Primer
tggactcaatattgagtccagg

SEQ ID NO: 9360 - DNA, 22 bp, Artificial sequence
  Primer
gtgactcaatattgagtcacgg

SEQ ID NO: 9361 - DNA, 22 bp, Artificial sequence
  Primer
gcgactcaatattgagtcgccg

SEQ ID NO: 9362 - DNA, 22 bp, Artificial sequence
  Primer
gcgactcaatattgagtcgctg

SEQ ID NO: 9363 - DNA, 22 bp, Artificial sequence
  Primer
acgactcaatattgagtcgtcg

SEQ ID NO: 9364 - DNA, 22 bp, Artificial sequence
  Primer
gagactcaatattgagtctccg

SEQ ID NO: 9365 - DNA, 22 bp, Artificial sequence
  Primer
gcgactcaatattgagtcgcag

SEQ ID NO: 9366 - DNA, 22 bp, Artificial sequence
  Primer
gtgactcaatattgagtcaccg

SEQ ID NO: 9367 - DNA, 22 bp, Artificial sequence
  Primer
cggactcaatattgagtccgtg

SEQ ID NO: 9368 - DNA, 22 bp, Artificial sequence
  Primer
cagactcaatattgagtctggg

SEQ ID NO: 9369 - DNA, 22 bp, Artificial sequence
  Primer
cggactcaatattgagtccgag

SEQ ID NO: 9370 - DNA, 22 bp, Artificial sequence
  Primer
ctgactcaatattgagtcaggg

SEQ ID NO: 9371 - DNA, 22 bp, Artificial sequence
  Primer
acgactcaatattgagtcgtgg

SEQ ID NO: 9372 - DNA, 22 bp, Artificial sequence
  Primer
ccgactcaatattgagtcggct

SEQ ID NO: 9373 - DNA, 22 bp, Artificial sequence
  Primer
ccgactcaatattgagtcggca

SEQ ID NO: 9374 - DNA, 22 bp, Artificial sequence
  Primer
gagactcaatattgagtctcgc

SEQ ID NO: 9375 - DNA, 22 bp, Artificial sequence
  Primer
gtgactcaatattgagtcacgc

SEQ ID NO: 9376 - DNA, 22 bp, Artificial sequence
  Primer
aggactcaatattgagtcctgc

SEQ ID NO: 9377 - DNA, 22 bp, Artificial sequence
  Primer
tggactcaatattgagtccagc

SEQ ID NO: 9378 - DNA, 22 bp, Artificial sequence
  Primer
aggactcaatattgagtcctcg

SEQ ID NO: 9379 - DNA, 22 bp, Artificial sequence
  Primer
tggactcaatattgagtccacg

SEQ ID NO: 9380 - DNA, 22 bp, Artificial sequence
  Primer
ccgactcaatattgagtcggtg

SEQ ID NO: 9381 - DNA, 22 bp, Artificial sequence
  Primer
ccgactcaatattgagtcggag

SEQ ID NO: 9382 - DNA, 22 bp, Artificial sequence
  Primer
gggactcaatattgagtcccgc

SEQ ID NO: 9383 - DNA, 22 bp, Artificial sequence
  Primer
gggactcaatattgagtccctc

SEQ ID NO: 9384 - DNA, 22 bp, Artificial sequence
  Primer
gggactcaatattgagtcccac

SEQ ID NO: 9385 - DNA, 22 bp, Artificial sequence
  Primer
  misc_feature (1)..(2): n is a, c, g, or t
  misc_feature (19)..(22): n is a, c, g, or t
nngactcaagcttgagtcnnnn

SEQ ID NO: 9386 - DNA, 22 bp, Artificial sequence
  Primer
cggactcaagcttgagtccgcc

SEQ ID NO: 9387 - DNA, 22 bp, Artificial sequence
  Primer
cggactcaagcttgagtccgct

SEQ ID NO: 9388 - DNA, 22 bp, Artificial sequence
  Primer
cggactcaagcttgagtccgtc

SEQ ID NO: 9389 - DNA, 22 bp, Artificial sequence
  Primer
aggactcaagcttgagtcctcc

SEQ ID NO: 9390 - DNA, 22 bp, Artificial sequence
  Primer
cagactcaagcttgagtctgcc

SEQ ID NO: 9391 - DNA, 22 bp, Artificial sequence
  Primer
cggactcaagcttgagtccgca

SEQ ID NO: 9392 - DNA, 22 bp, Artificial sequence
  Primer
cggactcaagcttgagtccgac

SEQ ID NO: 9393 - DNA, 22 bp, Artificial sequence
  Primer
tggactcaagcttgagtccacc

SEQ ID NO: 9394 - DNA, 22 bp, Artificial sequence
  Primer
ctgactcaagcttgagtcagcc

SEQ ID NO: 9395 - DNA, 22 bp, Artificial sequence
  Primer
ccgactcaagcttgagtcgggc

SEQ ID NO: 9396 - DNA, 22 bp, Artificial sequence
  Primer
ccgactcaagcttgagtcgggt

SEQ ID NO: 9397 - DNA, 22 bp, Artificial sequence
  Primer
ccgactcaagcttgagtcggtc

SEQ ID NO: 9398 - DNA, 22 bp, Artificial sequence
  Primer
acgactcaagcttgagtcgtgc

SEQ ID NO: 9399 - DNA, 22 bp, Artificial sequence
  Primer
cagactcaagcttgagtctggc

SEQ ID NO: 9400 - DNA, 22 bp, Artificial sequence
  Primer
ccgactcaagcttgagtcggga

SEQ ID NO: 9401 - DNA, 22 bp, Artificial sequence
  Primer
ccgactcaagcttgagtcggac

SEQ ID NO: 9402 - DNA, 22 bp, Artificial sequence
  Primer
ctgactcaagcttgagtcaggc

SEQ ID NO: 9403 - DNA, 22 bp, Artificial sequence
  Primer
gcgactcaagcttgagtcgccc

SEQ ID NO: 9404 - DNA, 22 bp, Artificial sequence
  Primer
gcgactcaagcttgagtcgcct

SEQ ID NO: 9405 - DNA, 22 bp, Artificial sequence
  Primer
gcgactcaagcttgagtcgctc

SEQ ID NO: 9406 - DNA, 22 bp, Artificial sequence
  Primer
acgactcaagcttgagtcgtcc

SEQ ID NO: 9407 - DNA, 22 bp, Artificial sequence
  Primer
gagactcaagcttgagtctccc

SEQ ID NO: 9408 - DNA, 22 bp, Artificial sequence
  Primer
gcgactcaagcttgagtcgcca

SEQ ID NO: 9409 - DNA, 22 bp, Artificial sequence
  Primer
gcgactcaagcttgagtcgcac

SEQ ID NO: 9410 - DNA, 22 bp, Artificial sequence
  Primer
gtgactcaagcttgagtcaccc

SEQ ID NO: 9411 - DNA, 22 bp, Artificial sequence
  Primer
gggactcaagcttgagtcccgt

SEQ ID NO: 9412 - DNA, 22 bp, Artificial sequence
  Primer
gggactcaagcttgagtccctg

SEQ ID NO: 9413 - DNA, 22 bp, Artificial sequence
  Primer
aggactcaagcttgagtcctgg

SEQ ID NO: 9414 - DNA, 22 bp, Artificial sequence
  Primer
gagactcaagcttgagtctcgg

SEQ ID NO: 9415 - DNA, 22 bp, Artificial sequence
  Primer
gggactcaagcttgagtcccga

SEQ ID NO: 9416 - DNA, 22 bp, Artificial sequence
  Primer
gggactcaagcttgagtcccag

SEQ ID NO: 9417 - DNA, 22 bp, Artificial sequence
  Primer
tggactcaagcttgagtccagg

SEQ ID NO: 9418 - DNA, 22 bp, Artificial sequence
  Primer
gtgactcaagcttgagtcacgg

SEQ ID NO: 9419 - DNA, 22 bp, Artificial sequence
  Primer
gcgactcaagcttgagtcgccg

SEQ ID NO: 9420 - DNA, 22 bp, Artificial sequence
  Primer
gcgactcaagcttgagtcgctg

SEQ ID NO: 9421 - DNA, 22 bp, Artificial sequence
  Primer
acgactcaagcttgagtcgtcg

SEQ ID NO: 9422 - DNA, 22 bp, Artificial sequence
  Primer
gagactcaagcttgagtctccg

SEQ ID NO: 9423 - DNA, 22 bp, Artificial sequence
  Primer
gcgactcaagcttgagtcgcag

SEQ ID NO: 9424 - DNA, 22 bp, Artificial sequence
  Primer
gtgactcaagcttgagtcaccg

SEQ ID NO: 9425 - DNA, 22 bp, Artificial sequence
  Primer
cggactcaagcttgagtccgtg

SEQ ID NO: 9426 - DNA, 22 bp, Artificial sequence
  Primer
cagactcaagcttgagtctggg

SEQ ID NO: 9427 - DNA, 22 bp, Artificial sequence
  Primer
cggactcaagcttgagtccgag

SEQ ID NO: 9428 - DNA, 22 bp, Artificial sequence
  Primer
ctgactcaagcttgagtcaggg

SEQ ID NO: 9429 - DNA, 22 bp, Artificial sequence
  Primer
acgactcaagcttgagtcgtgg

SEQ ID NO: 9430 - DNA, 22 bp, Artificial sequence
  Primer
ccgactcaagcttgagtcggct

SEQ ID NO: 9431 - DNA, 22 bp, Artificial sequence
  Primer
ccgactcaagcttgagtcggca

SEQ ID NO: 9432 - DNA, 22 bp, Artificial sequence
  Primer
gagactcaagcttgagtctcgc

SEQ ID NO: 9433 - DNA, 22 bp, Artificial sequence
  Primer
gtgactcaagcttgagtcacgc

SEQ ID NO: 9434 - DNA, 22 bp, Artificial sequence
  Primer
aggactcaagcttgagtcctgc

SEQ ID NO: 9435 - DNA, 22 bp, Artificial sequence
  Primer
tggactcaagcttgagtccagc

SEQ ID NO: 9436 - DNA, 22 bp, Artificial sequence
  Primer
aggactcaagcttgagtcctcg

SEQ ID NO: 9437 - DNA, 22 bp, Artificial sequence
  Primer
tggactcaagcttgagtccacg

SEQ ID NO: 9438 - DNA, 22 bp, Artificial sequence
  Primer
ccgactcaagcttgagtcggtg

SEQ ID NO: 9439 - DNA, 22 bp, Artificial sequence
  Primer
ccgactcaagcttgagtcggag

SEQ ID NO: 9440 - DNA, 22 bp, Artificial sequence
  Primer
gggactcaagcttgagtcccgc

SEQ ID NO: 9441 - DNA, 22 bp, Artificial sequence
  Primer
gggactcaagcttgagtccctc

SEQ ID NO: 9442 - DNA, 22 bp, Artificial sequence
  Primer
gggactcaagcttgagtcccac

SEQ ID NO: 9443 - DNA, 22 bp, Artificial sequence
  Primer
  misc_feature (1)..(2): n is a, c, g, or t
  misc_feature (19)..(22): n is a, c, g, or t
nngactcaacgttgagtcnnnn

SEQ ID NO: 9444 - DNA, 22 bp, Artificial sequence
  Primer
cggactcaacgttgagtccgcc

SEQ ID NO: 9445 - DNA, 22 bp, Artificial sequence
  Primer
cggactcaacgttgagtccgct

SEQ ID NO: 9446 - DNA, 22 bp, Artificial sequence
  Primer
cggactcaacgttgagtccgtc

SEQ ID NO: 9447 - DNA, 22 bp, Artificial sequence
  Primer
aggactcaacgttgagtcctcc

SEQ ID NO: 9448 - DNA, 22 bp, Artificial sequence
  Primer
cagactcaacgttgagtctgcc

SEQ ID NO: 9449 - DNA, 22 bp, Artificial sequence
  Primer
cggactcaacgttgagtccgca

SEQ ID NO: 9450 - DNA, 22 bp, Artificial sequence
  Primer
cggactcaacgttgagtccgac

SEQ ID NO: 9451 - DNA, 22 bp, Artificial sequence
  Primer
tggactcaacgttgagtccacc

SEQ ID NO: 9452 - DNA, 22 bp, Artificial sequence
  Primer
ctgactcaacgttgagtcagcc

SEQ ID NO: 9453 - DNA, 22 bp, Artificial sequence
  Primer
ccgactcaacgttgagtcgggc

SEQ ID NO: 9454 - DNA, 22 bp, Artificial sequence
  Primer
ccgactcaacgttgagtcgggt

SEQ ID NO: 9455 - DNA, 22 bp, Artificial sequence
  Primer
ccgactcaacgttgagtcggtc

SEQ ID NO: 9456 - DNA, 22 bp, Artificial sequence
  Primer
acgactcaacgttgagtcgtgc

SEQ ID NO: 9457 - DNA, 22 bp, Artificial sequence
  Primer
cagactcaacgttgagtctggc

SEQ ID NO: 9458 - DNA, 22 bp, Artificial sequence
  Primer
ccgactcaacgttgagtcggga

SEQ ID NO: 9459 - DNA, 22 bp, Artificial sequence
  Primer
ccgactcaacgttgagtcggac

SEQ ID NO: 9460 - DNA, 22 bp, Artificial sequence
  Primer
ctgactcaacgttgagtcaggc

SEQ ID NO: 9461 - DNA, 22 bp, Artificial sequence
  Primer
gcgactcaacgttgagtcgccc

SEQ ID NO: 9462 - DNA, 22 bp, Artificial sequence
  Primer
gcgactcaacgttgagtcgcct

SEQ ID NO: 9463 - DNA, 22 bp, Artificial sequence
  Primer
gcgactcaacgttgagtcgctc

SEQ ID NO: 9464 - DNA, 22 bp, Artificial sequence
  Primer
acgactcaacgttgagtcgtcc

SEQ ID NO: 9465 - DNA, 22 bp, Artificial sequence
  Primer
gagactcaacgttgagtctccc

SEQ ID NO: 9466 - DNA, 22 bp, Artificial sequence
  Primer
gcgactcaacgttgagtcgcca

SEQ ID NO: 9467 - DNA, 22 bp, Artificial sequence
  Primer
gcgactcaacgttgagtcgcac

SEQ ID NO: 9468 - DNA, 22 bp, Artificial sequence
  Primer
gtgactcaacgttgagtcaccc

SEQ ID NO: 9469 - DNA, 22 bp, Artificial sequence
  Primer
gggactcaacgttgagtcccgt

SEQ ID NO: 9470 - DNA, 22 bp, Artificial sequence
  Primer
gggactcaacgttgagtccctg

SEQ ID NO: 9471 - DNA, 22 bp, Artificial sequence
  Primer
aggactcaacgttgagtcctgg

SEQ ID NO: 9472 - DNA, 22 bp, Artificial sequence
  Primer
gagactcaacgttgagtctcgg

SEQ ID NO: 9473 - DNA, 22 bp, Artificial sequence
  Primer
gggactcaacgttgagtcccga

SEQ ID NO: 9474 - DNA, 22 bp, Artificial sequence
  Primer
gggactcaacgttgagtcccag

SEQ ID NO: 9475 - DNA, 22 bp, Artificial sequence
  Primer
tggactcaacgttgagtccagg

SEQ ID NO: 9476 - DNA, 22 bp, Artificial sequence
  Primer
gtgactcaacgttgagtcacgg

SEQ ID NO: 9477 - DNA, 22 bp, Artificial sequence
  Primer
gcgactcaacgttgagtcgccg

SEQ ID NO: 9478 - DNA, 22 bp, Artificial sequence
  Primer
gcgactcaacgttgagtcgctg

SEQ ID NO: 9479 - DNA, 22 bp, Artificial sequence
  Primer
acgactcaacgttgagtcgtcg

SEQ ID NO: 9480 - DNA, 22 bp, Artificial sequence
  Primer
gagactcaacgttgagtctccg

SEQ ID NO: 9481 - DNA, 22 bp, Artificial sequence
  Primer
gcgactcaacgttgagtcgcag

SEQ ID NO: 9482 - DNA, 22 bp, Artificial sequence
  Primer
gtgactcaacgttgagtcaccg

SEQ ID NO: 9483 - DNA, 22 bp, Artificial sequence
  Primer
cggactcaacgttgagtccgtg

SEQ ID NO: 9484 - DNA, 22 bp, Artificial sequence
  Primer
cagactcaacgttgagtctggg

SEQ ID NO: 9485 - DNA, 22 bp, Artificial sequence
  Primer
cggactcaacgttgagtccgag

SEQ ID NO: 9486 - DNA, 22 bp, Artificial sequence
  Primer
ctgactcaacgttgagtcaggg

SEQ ID NO: 9487 - DNA, 22 bp, Artificial sequence
  Primer
acgactcaacgttgagtcgtgg

SEQ ID NO: 9488 - DNA, 22 bp, Artificial sequence
  Primer
ccgactcaacgttgagtcggct

SEQ ID NO: 9489 - DNA, 22 bp, Artificial sequence
  Primer
ccgactcaacgttgagtcggca

SEQ ID NO: 9490 - DNA, 22 bp, Artificial sequence
  Primer
gagactcaacgttgagtctcgc

SEQ ID NO: 9491 - DNA, 22 bp, Artificial sequence
  Primer
gtgactcaacgttgagtcacgc

SEQ ID NO: 9492 - DNA, 22 bp, Artificial sequence
  Primer
aggactcaacgttgagtcctgc

SEQ ID NO: 9493 - DNA, 22 bp, Artificial sequence
  Primer
tggactcaacgttgagtccagc

SEQ ID NO: 9494 - DNA, 22 bp, Artificial sequence
  Primer
aggactcaacgttgagtcctcg

SEQ ID NO: 9495 - DNA, 22 bp, Artificial sequence
  Primer
tggactcaacgttgagtccacg

SEQ ID NO: 9496 - DNA, 22 bp, Artificial sequence
  Primer
ccgactcaacgttgagtcggtg

SEQ ID NO: 9497 - DNA, 22 bp, Artificial sequence
  Primer
ccgactcaacgttgagtcggag

SEQ ID NO: 9498 - DNA, 22 bp, Artificial sequence
  Primer
gggactcaacgttgagtcccgc

SEQ ID NO: 9499 - DNA, 22 bp, Artificial sequence
  Primer
gggactcaacgttgagtccctc

SEQ ID NO: 9500 - DNA, 22 bp, Artificial sequence
  Primer
gggactcaacgttgagtcccac

SEQ ID NO: 9501 - DNA, 22 bp, Artificial sequence
  Primer
  misc_feature (1)..(2): n is a, c, g, or t
  misc_feature (19)..(22): n is a, c, g, or t
nngactctaattagagtcnnnn

SEQ ID NO: 9502 - DNA, 22 bp, Artificial sequence
  Primer
cggactctaattagagtccgcc

SEQ ID NO: 9503 - DNA, 22 bp, Artificial sequence
  Primer
cggactctaattagagtccgct

SEQ ID NO: 9504 - DNA, 22 bp, Artificial sequence
  Primer
cggactctaattagagtccgtc

SEQ ID NO: 9505 - DNA, 22 bp, Artificial sequence
  Primer
aggactctaattagagtcctcc

SEQ ID NO: 9506 - DNA, 22 bp, Artificial sequence
  Primer
cagactctaattagagtctgcc

SEQ ID NO: 9507 - DNA, 22 bp, Artificial sequence
  Primer
cggactctaattagagtccgca

SEQ ID NO: 9508 - DNA, 22 bp, Artificial sequence
  Primer
cggactctaattagagtccgac

SEQ ID NO: 9509 - DNA, 22 bp, Artificial sequence
  Primer
tggactctaattagagtccacc

SEQ ID NO: 9510 - DNA, 22 bp, Artificial sequence
  Primer
ctgactctaattagagtcagcc

SEQ ID NO: 9511 - DNA, 22 bp, Artificial sequence
  Primer
ccgactctaattagagtcgggc

SEQ ID NO: 9512 - DNA, 22 bp, Artificial sequence
  Primer
ccgactctaattagagtcgggt

SEQ ID NO: 9513 - DNA, 22 bp, Artificial sequence
  Primer
ccgactctaattagagtcggtc

SEQ ID NO: 9514 - DNA, 22 bp, Artificial sequence
  Primer
acgactctaattagagtcgtgc

SEQ ID NO: 9515 - DNA, 22 bp, Artificial sequence
  Primer
cagactctaattagagtctggc

SEQ ID NO: 9516 - DNA, 22 bp, Artificial sequence
  Primer
ccgactctaattagagtcggga

SEQ ID NO: 9517 - DNA, 22 bp, Artificial sequence
  Primer
ccgactctaattagagtcggac

SEQ ID NO: 9518 - DNA, 22 bp, Artificial sequence
  Primer
ctgactctaattagagtcaggc

SEQ ID NO: 9519 - DNA, 22 bp, Artificial sequence
  Primer
gcgactctaattagagtcgccc

SEQ ID NO: 9520 - DNA, 22 bp, Artificial sequence
  Primer
gcgactctaattagagtcgcct

SEQ ID NO: 9521 - DNA, 22 bp, Artificial sequence
  Primer
gcgactctaattagagtcgctc

SEQ ID NO: 9522 - DNA, 22 bp, Artificial sequence
  Primer
acgactctaattagagtcgtcc

SEQ ID NO: 9523 - DNA, 22 bp, Artificial sequence
  Primer
gagactctaattagagtctccc

SEQ ID NO: 9524 - DNA, 22 bp, Artificial sequence
  Primer
gcgactctaattagagtcgcca

SEQ ID NO: 9525 - DNA, 22 bp, Artificial sequence
  Primer
gcgactctaattagagtcgcac

SEQ ID NO: 9526 - DNA, 22 bp, Artificial sequence
  Primer
gtgactctaattagagtcaccc

SEQ ID NO: 9527 - DNA, 22 bp, Artificial sequence
  Primer
gggactctaattagagtcccgt

SEQ ID NO: 9528 - DNA, 22 bp, Artificial sequence
  Primer
gggactctaattagagtccctg

SEQ ID NO: 9529 - DNA, 22 bp, Artificial sequence
  Primer
aggactctaattagagtcctgg

SEQ ID NO: 9530 - DNA, 22 bp, Artificial sequence
  Primer
gagactctaattagagtctcgg

SEQ ID NO: 9531 - DNA, 22 bp, Artificial sequence
  Primer
gggactctaattagagtcccga

SEQ ID NO: 9532 - DNA, 22 bp, Artificial sequence
  Primer
gggactctaattagagtcccag

SEQ ID NO: 9533 - DNA, 22 bp, Artificial sequence
  Primer
tggactctaattagagtccagg

SEQ ID NO: 9534 - DNA, 22 bp, Artificial sequence
  Primer
gtgactctaattagagtcacgg

SEQ ID NO: 9535 - DNA, 22 bp, Artificial sequence
  Primer
gcgactctaattagagtcgccg

SEQ ID NO: 9536 - DNA, 22 bp, Artificial sequence
  Primer
gcgactctaattagagtcgctg

SEQ ID NO: 9537 - DNA, 22 bp, Artificial sequence
  Primer
acgactctaattagagtcgtcg

SEQ ID NO: 9538 - DNA, 22 bp, Artificial sequence
  Primer
gagactctaattagagtctccg

SEQ ID NO: 9539 - DNA, 22 bp, Artificial sequence
  Primer
gcgactctaattagagtcgcag

SEQ ID NO: 9540 - DNA, 22 bp, Artificial sequence
  Primer
gtgactctaattagagtcaccg

SEQ ID NO: 9541 - DNA, 22 bp, Artificial sequence
  Primer
cggactctaattagagtccgtg

SEQ ID NO: 9542 - DNA, 22 bp, Artificial sequence
  Primer
cagactctaattagagtctggg

SEQ ID NO: 9543 - DNA, 22 bp, Artificial sequence
  Primer
cggactctaattagagtccgag

SEQ ID NO: 9544 - DNA, 22 bp, Artificial sequence
  Primer
ctgactctaattagagtcaggg

SEQ ID NO: 9545 - DNA, 22 bp, Artificial sequence
  Primer
acgactctaattagagtcgtgg

SEQ ID NO: 9546 - DNA, 22 bp, Artificial sequence
  Primer
ccgactctaattagagtcggct

SEQ ID NO: 9547 - DNA, 22 bp, Artificial sequence
  Primer
ccgactctaattagagtcggca

SEQ ID NO: 9548 - DNA, 22 bp, Artificial sequence
  Primer
gagactctaattagagtctcgc

SEQ ID NO: 9549 - DNA, 22 bp, Artificial sequence
  Primer
gtgactctaattagagtcacgc

SEQ ID NO: 9550 - DNA, 22 bp, Artificial sequence
  Primer
aggactctaattagagtcctgc

SEQ ID NO: 9551 - DNA, 22 bp, Artificial sequence
  Primer
tggactctaattagagtccagc

SEQ ID NO: 9552 - DNA, 22 bp, Artificial sequence
  Primer
aggactctaattagagtcctcg

SEQ ID NO: 9553 - DNA, 22 bp, Artificial sequence
  Primer
tggactctaattagagtccacg

SEQ ID NO: 9554 - DNA, 22 bp, Artificial sequence
  Primer
ccgactctaattagagtcggtg

SEQ ID NO: 9555 - DNA, 22 bp, Artificial sequence
  Primer
ccgactctaattagagtcggag

SEQ ID NO: 9556 - DNA, 22 bp, Artificial sequence
  Primer
gggactctaattagagtcccgc

SEQ ID NO: 9557 - DNA, 22 bp, Artificial sequence
  Primer
gggactctaattagagtccctc

SEQ ID NO: 9558 - DNA, 22 bp, Artificial sequence
  Primer
gggactctaattagagtcccac

SEQ ID NO: 9559 - DNA, 22 bp, Artificial sequence
  Primer
  misc_feature (1)..(2): n is a, c, g, or t
  misc_feature (19)..(22): n is a, c, g, or t
nngactctatatagagtcnnnn

SEQ ID NO: 9560 - DNA, 22 bp, Artificial sequence
  Primer
cggactctatatagagtccgcc

SEQ ID NO: 9561 - DNA, 22 bp, Artificial sequence
  Primer
cggactctatatagagtccgct

SEQ ID NO: 9562 - DNA, 22 bp, Artificial sequence
  Primer
cggactctatatagagtccgtc

SEQ ID NO: 9563 - DNA, 22 bp, Artificial sequence
  Primer
aggactctatatagagtcctcc

SEQ ID NO: 9564 - DNA, 22 bp, Artificial sequence
  Primer
cagactctatatagagtctgcc

SEQ ID NO: 9565 - DNA, 22 bp, Artificial sequence
  Primer
cggactctatatagagtccgca

SEQ ID NO: 9566 - DNA, 22 bp, Artificial sequence
  Primer
cggactctatatagagtccgac

SEQ ID NO: 9567 - DNA, 22 bp, Artificial sequence
  Primer
tggactctatatagagtccacc

SEQ ID NO: 9568 - DNA, 22 bp, Artificial sequence
  Primer
ctgactctatatagagtcagcc

SEQ ID NO: 9569 - DNA, 22 bp, Artificial sequence
  Primer
ccgactctatatagagtcgggc

SEQ ID NO: 9570 - DNA, 22 bp, Artificial sequence
  Primer
ccgactctatatagagtcgggt

SEQ ID NO: 9571 - DNA, 22 bp, Artificial sequence
  Primer
ccgactctatatagagtcggtc

SEQ ID NO: 9572 - DNA, 22 bp, Artificial sequence
  Primer
acgactctatatagagtcgtgc

SEQ ID NO: 9573 - DNA, 22 bp, Artificial sequence
  Primer
cagactctatatagagtctggc

SEQ ID NO: 9574 - DNA, 22 bp, Artificial sequence
  Primer
ccgactctatatagagtcggga

SEQ ID NO: 9575 - DNA, 22 bp, Artificial sequence
  Primer
ccgactctatatagagtcggac

SEQ ID NO: 9576 - DNA, 22 bp, Artificial sequence
  Primer
ctgactctatatagagtcaggc

SEQ ID NO: 9577 - DNA, 22 bp, Artificial sequence
  Primer
gcgactctatatagagtcgccc

SEQ ID NO: 9578 - DNA, 22 bp, Artificial sequence
  Primer
gcgactctatatagagtcgcct

SEQ ID NO: 9579 - DNA, 22 bp, Artificial sequence
  Primer
gcgactctatatagagtcgctc

SEQ ID NO: 9580 - DNA, 22 bp, Artificial sequence
  Primer
acgactctatatagagtcgtcc

SEQ ID NO: 9581 - DNA, 22 bp, Artificial sequence
  Primer
gagactctatatagagtctccc

SEQ ID NO: 9582 - DNA, 22 bp, Artificial sequence
  Primer
gcgactctatatagagtcgcca

SEQ ID NO: 9583 - DNA, 22 bp, Artificial sequence
  Primer
gcgactctatatagagtcgcac

SEQ ID NO: 9584 - DNA, 22 bp, Artificial sequence
  Primer
gtgactctatatagagtcaccc

SEQ ID NO: 9585 - DNA, 22 bp, Artificial sequence
  Primer
gggactctatatagagtcccgt

SEQ ID NO: 9586 - DNA, 22 bp, Artificial sequence
  Primer
gggactctatatagagtccctg

SEQ ID NO: 9587 - DNA, 22 bp, Artificial sequence
  Primer
aggactctatatagagtcctgg

SEQ ID NO: 9588 - DNA, 22 bp, Artificial sequence
  Primer
gagactctatatagagtctcgg

SEQ ID NO: 9589 - DNA, 22 bp, Artificial sequence
  Primer
gggactctatatagagtcccga

SEQ ID NO: 9590 - DNA, 22 bp, Artificial sequence
  Primer
gggactctatatagagtcccag

SEQ ID NO: 9591 - DNA, 22 bp, Artificial sequence
  Primer
tggactctatatagagtccagg

SEQ ID NO: 9592 - DNA, 22 bp, Artificial sequence
  Primer
gtgactctatatagagtcacgg

SEQ ID NO: 9593 - DNA, 22 bp, Artificial sequence
  Primer
gcgactctatatagagtcgccg

SEQ ID NO: 9594 - DNA, 22 bp, Artificial sequence
  Primer
gcgactctatatagagtcgctg

SEQ ID NO: 9595 - DNA, 22 bp, Artificial sequence
  Primer
acgactctatatagagtcgtcg

SEQ ID NO: 9596 - DNA, 22 bp, Artificial sequence
  Primer
gagactctatatagagtctccg

SEQ ID NO: 9597 - DNA, 22 bp, Artificial sequence
  Primer
gcgactctatatagagtcgcag

SEQ ID NO: 9598 - DNA, 22 bp, Artificial sequence
  Primer
gtgactctatatagagtcaccg

SEQ ID NO: 9599 - DNA, 22 bp, Artificial sequence
  Primer
cggactctatatagagtccgtg

SEQ ID NO: 9600 - DNA, 22 bp, Artificial sequence
  Primer
cagactctatatagagtctggg

SEQ ID NO: 9601 - DNA, 22 bp, Artificial sequence
  Primer
cggactctatatagagtccgag

SEQ ID NO: 9602 - DNA, 22 bp, Artificial sequence
  Primer
ctgactctatatagagtcaggg

SEQ ID NO: 9603 - DNA, 22 bp, Artificial sequence
  Primer
acgactctatatagagtcgtgg

SEQ ID NO: 9604 - DNA, 22 bp, Artificial sequence
  Primer
ccgactctatatagagtcggct

SEQ ID NO: 9605 - DNA, 22 bp, Artificial sequence
  Primer
ccgactctatatagagtcggca

SEQ ID NO: 9606 - DNA, 22 bp, Artificial sequence
  Primer
gagactctatatagagtctcgc

SEQ ID NO: 9607 - DNA, 22 bp, Artificial sequence
  Primer
gtgactctatatagagtcacgc

SEQ ID NO: 9608 - DNA, 22 bp, Artificial sequence
  Primer
aggactctatatagagtcctgc

SEQ ID NO: 9609 - DNA, 22 bp, Artificial sequence
  Primer
tggactctatatagagtccagc

SEQ ID NO: 9610 - DNA, 22 bp, Artificial sequence
  Primer
aggactctatatagagtcctcg

SEQ ID NO: 9611 - DNA, 22 bp, Artificial sequence
  Primer
tggactctatatagagtccacg

SEQ ID NO: 9612 - DNA, 22 bp, Artificial sequence
  Primer
ccgactctatatagagtcggtg

SEQ ID NO: 9613 - DNA, 22 bp, Artificial sequence
  Primer
ccgactctatatagagtcggag

SEQ ID NO: 9614 - DNA, 22 bp, Artificial sequence
  Primer
gggactctatatagagtcccgc

SEQ ID NO: 9615 - DNA, 22 bp, Artificial sequence
  Primer
gggactctatatagagtccctc

SEQ ID NO: 9616 - DNA, 22 bp, Artificial sequence
  Primer
gggactctatatagagtcccac

SEQ ID NO: 9617 - DNA, 22 bp, Artificial sequence
  Primer
  misc_feature (1)..(2): n is a, c, g, or t
  misc_feature (19)..(22): n is a, c, g, or t
nngactctagctagagtcnnnn

SEQ ID NO: 9618 - DNA, 22 bp, Artificial sequence
  Primer
cggactctagctagagtccgcc

SEQ ID NO: 9619 - DNA, 22 bp, Artificial sequence
  Primer
cggactctagctagagtccgct

SEQ ID NO: 9620 - DNA, 22 bp, Artificial sequence
  Primer
cggactctagctagagtccgtc

SEQ ID NO: 9621 - DNA, 22 bp, Artificial sequence
  Primer
aggactctagctagagtcctcc

SEQ ID NO: 9622 - DNA, 22 bp, Artificial sequence
  Primer
cagactctagctagagtctgcc

SEQ ID NO: 9623 - DNA, 22 bp, Artificial sequence
  Primer
cggactctagctagagtccgca

SEQ ID NO: 9624 - DNA, 22 bp, Artificial sequence
  Primer
cggactctagctagagtccgac

SEQ ID NO: 9625 - DNA, 22 bp, Artificial sequence
  Primer
tggactctagctagagtccacc

SEQ ID NO: 9626 - DNA, 22 bp, Artificial sequence
  Primer
ctgactctagctagagtcagcc

SEQ ID NO: 9627 - DNA, 22 bp, Artificial sequence
  Primer
ccgactctagctagagtcgggc

SEQ ID NO: 9628 - DNA, 22 bp, Artificial sequence
  Primer
ccgactctagctagagtcgggt

SEQ ID NO: 9629 - DNA, 22 bp, Artificial sequence
  Primer
ccgactctagctagagtcggtc

SEQ ID NO: 9630 - DNA, 22 bp, Artificial sequence
  Primer
acgactctagctagagtcgtgc

SEQ ID NO: 9631 - DNA, 22 bp, Artificial sequence
  Primer
cagactctagctagagtctggc

SEQ ID NO: 9632 - DNA, 22 bp, Artificial sequence
  Primer
ccgactctagctagagtcggga

SEQ ID NO: 9633 - DNA, 22 bp, Artificial sequence
  Primer
ccgactctagctagagtcggac

SEQ ID NO: 9634 - DNA, 22 bp, Artificial sequence
  Primer
ctgactctagctagagtcaggc

SEQ ID NO: 9635 - DNA, 22 bp, Artificial sequence
  Primer
gcgactctagctagagtcgccc

SEQ ID NO: 9636 - DNA, 22 bp, Artificial sequence
  Primer
gcgactctagctagagtcgcct

SEQ ID NO: 9637 - DNA, 22 bp, Artificial sequence
  Primer
gcgactctagctagagtcgctc

SEQ ID NO: 9638 - DNA, 22 bp, Artificial sequence
  Primer
acgactctagctagagtcgtcc

SEQ ID NO: 9639 - DNA, 22 bp, Artificial sequence
  Primer
gagactctagctagagtctccc

SEQ ID NO: 9640 - DNA, 22 bp, Artificial sequence
  Primer
gcgactctagctagagtcgcca

SEQ ID NO: 9641 - DNA, 22 bp, Artificial sequence
  Primer
gcgactctagctagagtcgcac

SEQ ID NO: 9642 - DNA, 22 bp, Artificial sequence
  Primer
gtgactctagctagagtcaccc

SEQ ID NO: 9643 - DNA, 22 bp, Artificial sequence
  Primer
gggactctagctagagtcccgt

SEQ ID NO: 9644 - DNA, 22 bp, Artificial sequence
  Primer
gggactctagctagagtccctg

SEQ ID NO: 9645 - DNA, 22 bp, Artificial sequence
  Primer
aggactctagctagagtcctgg

SEQ ID NO: 9646 - DNA, 22 bp, Artificial sequence
  Primer
gagactctagctagagtctcgg

SEQ ID NO: 9647 - DNA, 22 bp, Artificial sequence
  Primer
gggactctagctagagtcccga

SEQ ID NO: 9648 - DNA, 22 bp, Artificial sequence
  Primer
gggactctagctagagtcccag

SEQ ID NO: 9649 - DNA, 22 bp, Artificial sequence
  Primer
tggactctagctagagtccagg

SEQ ID NO: 9650 - DNA, 22 bp, Artificial sequence
  Primer
gtgactctagctagagtcacgg

SEQ ID NO: 9651 - DNA, 22 bp, Artificial sequence
  Primer
gcgactctagctagagtcgccg

SEQ ID NO: 9652 - DNA, 22 bp, Artificial sequence
  Primer
gcgactctagctagagtcgctg

SEQ ID NO: 9653 - DNA, 22 bp, Artificial sequence
  Primer
acgactctagctagagtcgtcg

SEQ ID NO: 9654 - DNA, 22 bp, Artificial sequence
  Primer
gagactctagctagagtctccg

SEQ ID NO: 9655 - DNA, 22 bp, Artificial sequence
  Primer
gcgactctagctagagtcgcag

SEQ ID NO: 9656 - DNA, 22 bp, Artificial sequence
  Primer
gtgactctagctagagtcaccg

SEQ ID NO: 9657 - DNA, 22 bp, Artificial sequence
  Primer
cggactctagctagagtccgtg

SEQ ID NO: 9658 - DNA, 22 bp, Artificial sequence
  Primer
cagactctagctagagtctggg

SEQ ID NO: 9659 - DNA, 22 bp, Artificial sequence
  Primer
cggactctagctagagtccgag

SEQ ID NO: 9660 - DNA, 22 bp, Artificial sequence
  Primer
ctgactctagctagagtcaggg

SEQ ID NO: 9661 - DNA, 22 bp, Artificial sequence
  Primer
acgactctagctagagtcgtgg

SEQ ID NO: 9662 - DNA, 22 bp, Artificial sequence
  Primer
ccgactctagctagagtcggct

SEQ ID NO: 9663 - DNA, 22 bp, Artificial sequence
  Primer
ccgactctagctagagtcggca

SEQ ID NO: 9664 - DNA, 22 bp, Artificial sequence
  Primer
gagactctagctagagtctcgc

SEQ ID NO: 9665 - DNA, 22 bp, Artificial sequence
  Primer
gtgactctagctagagtcacgc

SEQ ID NO: 9666 - DNA, 22 bp, Artificial sequence
  Primer
aggactctagctagagtcctgc

SEQ ID NO: 9667 - DNA, 22 bp, Artificial sequence
  Primer
tggactctagctagagtccagc

SEQ ID NO: 9668 - DNA, 22 bp, Artificial sequence
  Primer
aggactctagctagagtcctcg

SEQ ID NO: 9669 - DNA, 22 bp, Artificial sequence
  Primer
tggactctagctagagtccacg

SEQ ID NO: 9670 - DNA, 22 bp, Artificial sequence
  Primer
ccgactctagctagagtcggtg

SEQ ID NO: 9671 - DNA, 22 bp, Artificial sequence
  Primer
ccgactctagctagagtcggag

SEQ ID NO: 9672 - DNA, 22 bp, Artificial sequence
  Primer
gggactctagctagagtcccgc

SEQ ID NO: 9673 - DNA, 22 bp, Artificial sequence
  Primer
gggactctagctagagtccctc

SEQ ID NO: 9674 - DNA, 22 bp, Artificial sequence
  Primer
gggactctagctagagtcccac

SEQ ID NO: 9675 - DNA, 22 bp, Artificial sequence
  Primer
  misc_feature (1)..(2): n is a, c, g, or t
  misc_feature (19)..(22): n is a, c, g, or t
nngactctacgtagagtcnnnn

SEQ ID NO: 9676 - DNA, 22 bp, Artificial sequence
  Primer
cggactctacgtagagtccgcc

SEQ ID NO: 9677 - DNA, 22 bp, Artificial sequence
  Primer
cggactctacgtagagtccgct

SEQ ID NO: 9678 - DNA, 22 bp, Artificial sequence
  Primer
cggactctacgtagagtccgtc

SEQ ID NO: 9679 - DNA, 22 bp, Artificial sequence
  Primer
aggactctacgtagagtcctcc

SEQ ID NO: 9680 - DNA, 22 bp, Artificial sequence
  Primer
cagactctacgtagagtctgcc

SEQ ID NO: 9681 - DNA, 22 bp, Artificial sequence
  Primer
cggactctacgtagagtccgca

SEQ ID NO: 9682 - DNA, 22 bp, Artificial sequence
  Primer
cggactctacgtagagtccgac

SEQ ID NO: 9683 - DNA, 22 bp, Artificial sequence
  Primer
tggactctacgtagagtccacc

SEQ ID NO: 9684 - DNA, 22 bp, Artificial sequence
  Primer
ctgactctacgtagagtcagcc

SEQ ID NO: 9685 - DNA, 22 bp, Artificial sequence
  Primer
ccgactctacgtagagtcgggc

SEQ ID NO: 9686 - DNA, 22 bp, Artificial sequence
  Primer
ccgactctacgtagagtcgggt

SEQ ID NO: 9687 - DNA, 22 bp, Artificial sequence
  Primer
ccgactctacgtagagtcggtc

SEQ ID NO: 9688 - DNA, 22 bp, Artificial sequence
  Primer
acgactctacgtagagtcgtgc

SEQ ID NO: 9689 - DNA, 22 bp, Artificial sequence
  Primer
cagactctacgtagagtctggc

SEQ ID NO: 9690 - DNA, 22 bp, Artificial sequence
  Primer
ccgactctacgtagagtcggga

SEQ ID NO: 9691 - DNA, 22 bp, Artificial sequence
  Primer
ccgactctacgtagagtcggac

SEQ ID NO: 9692 - DNA, 22 bp, Artificial sequence
  Primer
ctgactctacgtagagtcaggc

SEQ ID NO: 9693 - DNA, 22 bp, Artificial sequence
  Primer
gcgactctacgtagagtcgccc

SEQ ID NO: 9694 - DNA, 22 bp, Artificial sequence
  Primer
gcgactctacgtagagtcgcct

SEQ ID NO: 9695 - DNA, 22 bp, Artificial sequence
  Primer
gcgactctacgtagagtcgctc

SEQ ID NO: 9696 - DNA, 22 bp, Artificial sequence
  Primer
acgactctacgtagagtcgtcc

SEQ ID NO: 9697 - DNA, 22 bp, Artificial sequence
  Primer
gagactctacgtagagtctccc

SEQ ID NO: 9698 - DNA, 22 bp, Artificial sequence
  Primer
gcgactctacgtagagtcgcca

SEQ ID NO: 9699 - DNA, 22 bp, Artificial sequence
  Primer
gcgactctacgtagagtcgcac

SEQ ID NO: 9700 - DNA, 22 bp, Artificial sequence
  Primer
gtgactctacgtagagtcaccc

SEQ ID NO: 9701 - DNA, 22 bp, Artificial sequence
  Primer
gggactctacgtagagtcccgt

SEQ ID NO: 9702 - DNA, 22 bp, Artificial sequence
  Primer
gggactctacgtagagtccctg

SEQ ID NO: 9703 - DNA, 22 bp, Artificial sequence
  Primer
aggactctacgtagagtcctgg

SEQ ID NO: 9704 - DNA, 22 bp, Artificial sequence
  Primer
gagactctacgtagagtctcgg

SEQ ID NO: 9705 - DNA, 22 bp, Artificial sequence
  Primer
gggactctacgtagagtcccga

SEQ ID NO: 9706 - DNA, 22 bp, Artificial sequence
  Primer
gggactctacgtagagtcccag

SEQ ID NO: 9707 - DNA, 22 bp, Artificial sequence
  Primer
tggactctacgtagagtccagg

SEQ ID NO: 9708 - DNA, 22 bp, Artificial sequence
  Primer
gtgactctacgtagagtcacgg

SEQ ID NO: 9709 - DNA, 22 bp, Artificial sequence
  Primer
gcgactctacgtagagtcgccg

SEQ ID NO: 9710 - DNA, 22 bp, Artificial sequence
  Primer
gcgactctacgtagagtcgctg

SEQ ID NO: 9711 - DNA, 22 bp, Artificial sequence
  Primer
acgactctacgtagagtcgtcg

SEQ ID NO: 9712 - DNA, 22 bp, Artificial sequence
  Primer
gagactctacgtagagtctccg

SEQ ID NO: 9713 - DNA, 22 bp, Artificial sequence
  Primer
gcgactctacgtagagtcgcag

SEQ ID NO: 9714 - DNA, 22 bp, Artificial sequence
  Primer
gtgactctacgtagagtcaccg

SEQ ID NO: 9715 - DNA, 22 bp, Artificial sequence
  Primer
cggactctacgtagagtccgtg

SEQ ID NO: 9716 - DNA, 22 bp, Artificial sequence
  Primer
cagactctacgtagagtctggg

SEQ ID NO: 9717 - DNA, 22 bp, Artificial sequence
  Primer
cggactctacgtagagtccgag

SEQ ID NO: 9718 - DNA, 22 bp, Artificial sequence
  Primer
ctgactctacgtagagtcaggg

SEQ ID NO: 9719 - DNA, 22 bp, Artificial sequence
  Primer
acgactctacgtagagtcgtgg

SEQ ID NO: 9720 - DNA, 22 bp, Artificial sequence
  Primer
ccgactctacgtagagtcggct

SEQ ID NO: 9721 - DNA, 22 bp, Artificial sequence
  Primer
ccgactctacgtagagtcggca

SEQ ID NO: 9722 - DNA, 22 bp, Artificial sequence
  Primer
gagactctacgtagagtctcgc

SEQ ID NO: 9723 - DNA, 22 bp, Artificial sequence
  Primer
gtgactctacgtagagtcacgc

SEQ ID NO: 9724 - DNA, 22 bp, Artificial sequence
  Primer
aggactctacgtagagtcctgc

SEQ ID NO: 9725 - DNA, 22 bp, Artificial sequence
  Primer
tggactctacgtagagtccagc

SEQ ID NO: 9726 - DNA, 22 bp, Artificial sequence
  Primer
aggactctacgtagagtcctcg

SEQ ID NO: 9727 - DNA, 22 bp, Artificial sequence
  Primer
tggactctacgtagagtccacg

SEQ ID NO: 9728 - DNA, 22 bp, Artificial sequence
  Primer
ccgactctacgtagagtcggtg

SEQ ID NO: 9729 - DNA, 22 bp, Artificial sequence
  Primer
ccgactctacgtagagtcggag

SEQ ID NO: 9730 - DNA, 22 bp, Artificial sequence
  Primer
gggactctacgtagagtcccgc

SEQ ID NO: 9731 - DNA, 22 bp, Artificial sequence
  Primer
gggactctacgtagagtccctc

SEQ ID NO: 9732 - DNA, 22 bp, Artificial sequence
  Primer
gggactctacgtagagtcccac

SEQ ID NO: 9733 - DNA, 22 bp, Artificial sequence
  Primer
  misc_feature (1)..(2): n is a, c, g, or t
  misc_feature (19)..(22): n is a, c, g, or t
nngactcatatatgagtcnnnn

SEQ ID NO: 9734 - DNA, 22 bp, Artificial sequence
  Primer
cggactcatatatgagtccgcc

SEQ ID NO: 9735 - DNA, 22 bp, Artificial sequence
  Primer
cggactcatatatgagtccgct

SEQ ID NO: 9736 - DNA, 22 bp, Artificial sequence
  Primer
cggactcatatatgagtccgtc

SEQ ID NO: 9737 - DNA, 22 bp, Artificial sequence
  Primer
aggactcatatatgagtcctcc

SEQ ID NO: 9738 - DNA, 22 bp, Artificial sequence
  Primer
cagactcatatatgagtctgcc

SEQ ID NO: 9739 - DNA, 22 bp, Artificial sequence
  Primer
cggactcatatatgagtccgca

SEQ ID NO: 9740 - DNA, 22 bp, Artificial sequence
  Primer
cggactcatatatgagtccgac

SEQ ID NO: 9741 - DNA, 22 bp, Artificial sequence
  Primer
tggactcatatatgagtccacc

SEQ ID NO: 9742 - DNA, 22 bp, Artificial sequence
  Primer
ctgactcatatatgagtcagcc

SEQ ID NO: 9743 - DNA, 22 bp, Artificial sequence
  Primer
ccgactcatatatgagtcgggc

SEQ ID NO: 9744 - DNA, 22 bp, Artificial sequence
  Primer
ccgactcatatatgagtcgggt

SEQ ID NO: 9745 - DNA, 22 bp, Artificial sequence
  Primer
ccgactcatatatgagtcggtc

SEQ ID NO: 9746 - DNA, 22 bp, Artificial sequence
  Primer
acgactcatatatgagtcgtgc

SEQ ID NO: 9747 - DNA, 22 bp, Artificial sequence
  Primer
cagactcatatatgagtctggc

SEQ ID NO: 9748 - DNA, 22 bp, Artificial sequence
  Primer
ccgactcatatatgagtcggga

SEQ ID NO: 9749 - DNA, 22 bp, Artificial sequence
  Primer
ccgactcatatatgagtcggac

SEQ ID NO: 9750 - DNA, 22 bp, Artificial sequence
  Primer
ctgactcatatatgagtcaggc

SEQ ID NO: 9751 - DNA, 22 bp, Artificial sequence
  Primer
gcgactcatatatgagtcgccc

SEQ ID NO: 9752 - DNA, 22 bp, Artificial sequence
  Primer
gcgactcatatatgagtcgcct

SEQ ID NO: 9753 - DNA, 22 bp, Artificial sequence
  Primer
gcgactcatatatgagtcgctc

SEQ ID NO: 9754 - DNA, 22 bp, Artificial sequence
  Primer
acgactcatatatgagtcgtcc

SEQ ID NO: 9755 - DNA, 22 bp, Artificial sequence
  Primer
gagactcatatatgagtctccc

SEQ ID NO: 9756 - DNA, 22 bp, Artificial sequence
  Primer
gcgactcatatatgagtcgcca

SEQ ID NO: 9757 - DNA, 22 bp, Artificial sequence
  Primer
gcgactcatatatgagtcgcac

SEQ ID NO: 9758 - DNA, 22 bp, Artificial sequence
  Primer
gtgactcatatatgagtcaccc

SEQ ID NO: 9759 - DNA, 22 bp, Artificial sequence
  Primer
gggactcatatatgagtcccgt

SEQ ID NO: 9760 - DNA, 22 bp, Artificial sequence
  Primer
gggactcatatatgagtccctg

SEQ ID NO: 9761 - DNA, 22 bp, Artificial sequence
  Primer
aggactcatatatgagtcctgg

SEQ ID NO: 9762 - DNA, 22 bp, Artificial sequence
  Primer
gagactcatatatgagtctcgg

SEQ ID NO: 9763 - DNA, 22 bp, Artificial sequence
  Primer
gggactcatatatgagtcccga

SEQ ID NO: 9764 - DNA, 22 bp, Artificial sequence
  Primer
gggactcatatatgagtcccag

SEQ ID NO: 9765 - DNA, 22 bp, Artificial sequence
  Primer
tggactcatatatgagtccagg

SEQ ID NO: 9766 - DNA, 22 bp, Artificial sequence
  Primer
gtgactcatatatgagtcacgg

SEQ ID NO: 9767 - DNA, 22 bp, Artificial sequence
  Primer
gcgactcatatatgagtcgccg

SEQ ID NO: 9768 - DNA, 22 bp, Artificial sequence
  Primer
gcgactcatatatgagtcgctg

SEQ ID NO: 9769 - DNA, 22 bp, Artificial sequence
  Primer
acgactcatatatgagtcgtcg

SEQ ID NO: 9770 - DNA, 22 bp, Artificial sequence
  Primer
gagactcatatatgagtctccg

SEQ ID NO: 9771 - DNA, 22 bp, Artificial sequence
  Primer
gcgactcatatatgagtcgcag

SEQ ID NO: 9772 - DNA, 22 bp, Artificial sequence
  Primer
gtgactcatatatgagtcaccg

SEQ ID NO: 9773 - DNA, 22 bp, Artificial sequence
  Primer
cggactcatatatgagtccgtg

SEQ ID NO: 9774 - DNA, 22 bp, Artificial sequence
  Primer
cagactcatatatgagtctggg

SEQ ID NO: 9775 - DNA, 22 bp, Artificial sequence
  Primer
cggactcatatatgagtccgag

SEQ ID NO: 9776 - DNA, 22 bp, Artificial sequence
  Primer
ctgactcatatatgagtcaggg

SEQ ID NO: 9777 - DNA, 22 bp, Artificial sequence
  Primer
acgactcatatatgagtcgtgg

SEQ ID NO: 9778 - DNA, 22 bp, Artificial sequence
  Primer
ccgactcatatatgagtcggct

SEQ ID NO: 9779 - DNA, 22 bp, Artificial sequence
  Primer
ccgactcatatatgagtcggca

SEQ ID NO: 9780 - DNA, 22 bp, Artificial sequence
  Primer
gagactcatatatgagtctcgc

SEQ ID NO: 9781 - DNA, 22 bp, Artificial sequence
  Primer
gtgactcatatatgagtcacgc

SEQ ID NO: 9782 - DNA, 22 bp, Artificial sequence
  Primer
aggactcatatatgagtcctgc

SEQ ID NO: 9783 - DNA, 22 bp, Artificial sequence
  Primer
tggactcatatatgagtccagc

SEQ ID NO: 9784 - DNA, 22 bp, Artificial sequence
  Primer
aggactcatatatgagtcctcg

SEQ ID NO: 9785 - DNA, 22 bp, Artificial sequence
  Primer
tggactcatatatgagtccacg

SEQ ID NO: 9786 - DNA, 22 bp, Artificial sequence
  Primer
ccgactcatatatgagtcggtg

SEQ ID NO: 9787 - DNA, 22 bp, Artificial sequence
  Primer
ccgactcatatatgagtcggag

SEQ ID NO: 9788 - DNA, 22 bp, Artificial sequence
  Primer
gggactcatatatgagtcccgc

SEQ ID NO: 9789 - DNA, 22 bp, Artificial sequence
  Primer
gggactcatatatgagtccctc

SEQ ID NO: 9790 - DNA, 22 bp, Artificial sequence
  Primer
gggactcatatatgagtcccac

SEQ ID NO: 9791 - DNA, 22 bp, Artificial sequence
  Primer
  misc_feature (1)..(2): n is a, c, g, or t
  misc_feature (19)..(22): n is a, c, g, or t
nngactcattaatgagtcnnnn

SEQ ID NO: 9792 - DNA, 22 bp, Artificial sequence
  Primer
cggactcattaatgagtccgcc

SEQ ID NO: 9793 - DNA, 22 bp, Artificial sequence
  Primer
cggactcattaatgagtccgct

SEQ ID NO: 9794 - DNA, 22 bp, Artificial sequence
  Primer
cggactcattaatgagtccgtc

SEQ ID NO: 9795 - DNA, 22 bp, Artificial sequence
  Primer
aggactcattaatgagtcctcc

SEQ ID NO: 9796 - DNA, 22 bp, Artificial sequence
  Primer
cagactcattaatgagtctgcc

SEQ ID NO: 9797 - DNA, 22 bp, Artificial sequence
  Primer
cggactcattaatgagtccgca

SEQ ID NO: 9798 - DNA, 22 bp, Artificial sequence
  Primer
cggactcattaatgagtccgac

SEQ ID NO: 9799 - DNA, 22 bp, Artificial sequence
  Primer
tggactcattaatgagtccacc

SEQ ID NO: 9800 - DNA, 22 bp, Artificial sequence
  Primer
ctgactcattaatgagtcagcc

SEQ ID NO: 9801 - DNA, 22 bp, Artificial sequence
  Primer
ccgactcattaatgagtcgggc

SEQ ID NO: 9802 - DNA, 22 bp, Artificial sequence
  Primer
ccgactcattaatgagtcgggt

SEQ ID NO: 9803 - DNA, 22 bp, Artificial sequence
  Primer
ccgactcattaatgagtcggtc

SEQ ID NO: 9804 - DNA, 22 bp, Artificial sequence
  Primer
acgactcattaatgagtcgtgc

SEQ ID NO: 9805 - DNA, 22 bp, Artificial sequence
  Primer
cagactcattaatgagtctggc

SEQ ID NO: 9806 - DNA, 22 bp, Artificial sequence
  Primer
ccgactcattaatgagtcggga

SEQ ID NO: 9807 - DNA, 22 bp, Artificial sequence
  Primer
ccgactcattaatgagtcggac

SEQ ID NO: 9808 - DNA, 22 bp, Artificial sequence
  Primer
ctgactcattaatgagtcaggc

SEQ ID NO: 9809 - DNA, 22 bp, Artificial sequence
  Primer
gcgactcattaatgagtcgccc

SEQ ID NO: 9810 - DNA, 22 bp, Artificial sequence
  Primer
gcgactcattaatgagtcgcct

SEQ ID NO: 9811 - DNA, 22 bp, Artificial sequence
  Primer
gcgactcattaatgagtcgctc

SEQ ID NO: 9812 - DNA, 22 bp, Artificial sequence
  Primer
acgactcattaatgagtcgtcc

SEQ ID NO: 9813 - DNA, 22 bp, Artificial sequence
  Primer
gagactcattaatgagtctccc

SEQ ID NO: 9814 - DNA, 22 bp, Artificial sequence
  Primer
gcgactcattaatgagtcgcca

SEQ ID NO: 9815 - DNA, 22 bp, Artificial sequence
  Primer
gcgactcattaatgagtcgcac

SEQ ID NO: 9816 - DNA, 22 bp, Artificial sequence
  Primer
gtgactcattaatgagtcaccc

SEQ ID NO: 9817 - DNA, 22 bp, Artificial sequence
  Primer
gggactcattaatgagtcccgt

SEQ ID NO: 9818 - DNA, 22 bp, Artificial sequence
  Primer
gggactcattaatgagtccctg

SEQ ID NO: 9819 - DNA, 22 bp, Artificial sequence
  Primer
aggactcattaatgagtcctgg

SEQ ID NO: 9820 - DNA, 22 bp, Artificial sequence
  Primer
gagactcattaatgagtctcgg

SEQ ID NO: 9821 - DNA, 22 bp, Artificial sequence
  Primer
gggactcattaatgagtcccga

SEQ ID NO: 9822 - DNA, 22 bp, Artificial sequence
  Primer
gggactcattaatgagtcccag

SEQ ID NO: 9823 - DNA, 22 bp, Artificial sequence
  Primer
tggactcattaatgagtccagg

SEQ ID NO: 9824 - DNA, 22 bp, Artificial sequence
  Primer
gtgactcattaatgagtcacgg

SEQ ID NO: 9825 - DNA, 22 bp, Artificial sequence
  Primer
gcgactcattaatgagtcgccg

SEQ ID NO: 9826 - DNA, 22 bp, Artificial sequence
  Primer
gcgactcattaatgagtcgctg

SEQ ID NO: 9827 - DNA, 22 bp, Artificial sequence
  Primer
acgactcattaatgagtcgtcg

SEQ ID NO: 9828 - DNA, 22 bp, Artificial sequence
  Primer
gagactcattaatgagtctccg

SEQ ID NO: 9829 - DNA, 22 bp, Artificial sequence
  Primer
gcgactcattaatgagtcgcag

SEQ ID NO: 9830 - DNA, 22 bp, Artificial sequence
  Primer
gtgactcattaatgagtcaccg

SEQ ID NO: 9831 - DNA, 22 bp, Artificial sequence
  Primer
cggactcattaatgagtccgtg

SEQ ID NO: 9832 - DNA, 22 bp, Artificial sequence
  Primer
cagactcattaatgagtctggg

SEQ ID NO: 9833 - DNA, 22 bp, Artificial sequence
  Primer
cggactcattaatgagtccgag

SEQ ID NO: 9834 - DNA, 22 bp, Artificial sequence
  Primer
ctgactcattaatgagtcaggg

SEQ ID NO: 9835 - DNA, 22 bp, Artificial sequence
  Primer
acgactcattaatgagtcgtgg

SEQ ID NO: 9836 - DNA, 22 bp, Artificial sequence
  Primer
ccgactcattaatgagtcggct

SEQ ID NO: 9837 - DNA, 22 bp, Artificial sequence
  Primer
ccgactcattaatgagtcggca

SEQ ID NO: 9838 - DNA, 22 bp, Artificial sequence
  Primer
gagactcattaatgagtctcgc

SEQ ID NO: 9839 - DNA, 22 bp, Artificial sequence
  Primer
gtgactcattaatgagtcacgc

SEQ ID NO: 9840 - DNA, 22 bp, Artificial sequence
  Primer
aggactcattaatgagtcctgc

SEQ ID NO: 9841 - DNA, 22 bp, Artificial sequence
  Primer
tggactcattaatgagtccagc

SEQ ID NO: 9842 - DNA, 22 bp, Artificial sequence
  Primer
aggactcattaatgagtcctcg

SEQ ID NO: 9843 - DNA, 22 bp, Artificial sequence
  Primer
tggactcattaatgagtccacg

SEQ ID NO: 9844 - DNA, 22 bp, Artificial sequence
  Primer
ccgactcattaatgagtcggtg

SEQ ID NO: 9845 - DNA, 22 bp, Artificial sequence
  Primer
ccgactcattaatgagtcggag

SEQ ID NO: 9846 - DNA, 22 bp, Artificial sequence
  Primer
gggactcattaatgagtcccgc

SEQ ID NO: 9847 - DNA, 22 bp, Artificial sequence
  Primer
gggactcattaatgagtccctc

SEQ ID NO: 9848 - DNA, 22 bp, Artificial sequence
  Primer
gggactcattaatgagtcccac

SEQ ID NO: 9849 - DNA, 22 bp, Artificial sequence
  Primer
  misc_feature (1)..(2): n is a, c, g, or t
  misc_feature (19)..(22): n is a, c, g, or t
nngactcatgcatgagtcnnnn

SEQ ID NO: 9850 - DNA, 22 bp, Artificial sequence
  Primer
cggactcatgcatgagtccgcc

SEQ ID NO: 9851 - DNA, 22 bp, Artificial sequence
  Primer
cggactcatgcatgagtccgct

SEQ ID NO: 9852 - DNA, 22 bp, Artificial sequence
  Primer
cggactcatgcatgagtccgtc

SEQ ID NO: 9853 - DNA, 22 bp, Artificial sequence
  Primer
aggactcatgcatgagtcctcc

SEQ ID NO: 9854 - DNA, 22 bp, Artificial sequence
  Primer
cagactcatgcatgagtctgcc

SEQ ID NO: 9855 - DNA, 22 bp, Artificial sequence
  Primer
cggactcatgcatgagtccgca

SEQ ID NO: 9856 - DNA, 22 bp, Artificial sequence
  Primer
cggactcatgcatgagtccgac

SEQ ID NO: 9857 - DNA, 22 bp, Artificial sequence
  Primer
tggactcatgcatgagtccacc

SEQ ID NO: 9858 - DNA, 22 bp, Artificial sequence
  Primer
ctgactcatgcatgagtcagcc

SEQ ID NO: 9859 - DNA, 22 bp, Artificial sequence
  Primer
ccgactcatgcatgagtcgggc

SEQ ID NO: 9860 - DNA, 22 bp, Artificial sequence
  Primer
ccgactcatgcatgagtcgggt

SEQ ID NO: 9861 - DNA, 22 bp, Artificial sequence
  Primer
ccgactcatgcatgagtcggtc

SEQ ID NO: 9862 - DNA, 22 bp, Artificial sequence
  Primer
acgactcatgcatgagtcgtgc

SEQ ID NO: 9863 - DNA, 22 bp, Artificial sequence
  Primer
cagactcatgcatgagtctggc

SEQ ID NO: 9864 - DNA, 22 bp, Artificial sequence
  Primer
ccgactcatgcatgagtcggga

SEQ ID NO: 9865 - DNA, 22 bp, Artificial sequence
  Primer
ccgactcatgcatgagtcggac

SEQ ID NO: 9866 - DNA, 22 bp, Artificial sequence
  Primer
ctgactcatgcatgagtcaggc

SEQ ID NO: 9867 - DNA, 22 bp, Artificial sequence
  Primer
gcgactcatgcatgagtcgccc

SEQ ID NO: 9868 - DNA, 22 bp, Artificial sequence
  Primer
gcgactcatgcatgagtcgcct

SEQ ID NO: 9869 - DNA, 22 bp, Artificial sequence
  Primer
gcgactcatgcatgagtcgctc

SEQ ID NO: 9870 - DNA, 22 bp, Artificial sequence
  Primer
acgactcatgcatgagtcgtcc

SEQ ID NO: 9871 - DNA, 22 bp, Artificial sequence
  Primer
gagactcatgcatgagtctccc

SEQ ID NO: 9872 - DNA, 22 bp, Artificial sequence
  Primer
gcgactcatgcatgagtcgcca

SEQ ID NO: 9873 - DNA, 22 bp, Artificial sequence
  Primer
gcgactcatgcatgagtcgcac

SEQ ID NO: 9874 - DNA, 22 bp, Artificial sequence
  Primer
gtgactcatgcatgagtcaccc

SEQ ID NO: 9875 - DNA, 22 bp, Artificial sequence
  Primer
gggactcatgcatgagtcccgt

SEQ ID NO: 9876 - DNA, 22 bp, Artificial sequence
  Primer
gggactcatgcatgagtccctg

SEQ ID NO: 9877 - DNA, 22 bp, Artificial sequence
  Primer
aggactcatgcatgagtcctgg

SEQ ID NO: 9878 - DNA, 22 bp, Artificial sequence
  Primer
gagactcatgcatgagtctcgg

SEQ ID NO: 9879 - DNA, 22 bp, Artificial sequence
  Primer
gggactcatgcatgagtcccga

SEQ ID NO: 9880 - DNA, 22 bp, Artificial sequence
  Primer
gggactcatgcatgagtcccag

SEQ ID NO: 9881 - DNA, 22 bp, Artificial sequence
  Primer
tggactcatgcatgagtccagg

SEQ ID NO: 9882 - DNA, 22 bp, Artificial sequence
  Primer
gtgactcatgcatgagtcacgg

SEQ ID NO: 9883 - DNA, 22 bp, Artificial sequence
  Primer
gcgactcatgcatgagtcgccg

SEQ ID NO: 9884 - DNA, 22 bp, Artificial sequence
  Primer
gcgactcatgcatgagtcgctg

SEQ ID NO: 9885 - DNA, 22 bp, Artificial sequence
  Primer
acgactcatgcatgagtcgtcg

SEQ ID NO: 9886 - DNA, 22 bp, Artificial sequence
  Primer
gagactcatgcatgagtctccg

SEQ ID NO: 9887 - DNA, 22 bp, Artificial sequence
  Primer
gcgactcatgcatgagtcgcag

SEQ ID NO: 9888 - DNA, 22 bp, Artificial sequence
  Primer
gtgactcatgcatgagtcaccg

SEQ ID NO: 9889 - DNA, 22 bp, Artificial sequence
  Primer
cggactcatgcatgagtccgtg

SEQ ID NO: 9890 - DNA, 22 bp, Artificial sequence
  Primer
cagactcatgcatgagtctggg

SEQ ID NO: 9891 - DNA, 22 bp, Artificial sequence
  Primer
cggactcatgcatgagtccgag

SEQ ID NO: 9892 - DNA, 22 bp, Artificial sequence
  Primer
ctgactcatgcatgagtcaggg

SEQ ID NO: 9893 - DNA, 22 bp, Artificial sequence
  Primer
acgactcatgcatgagtcgtgg

SEQ ID NO: 9894 - DNA, 22 bp, Artificial sequence
  Primer
ccgactcatgcatgagtcggct

SEQ ID NO: 9895 - DNA, 22 bp, Artificial sequence
  Primer
ccgactcatgcatgagtcggca

SEQ ID NO: 9896 - DNA, 22 bp, Artificial sequence
  Primer
gagactcatgcatgagtctcgc

SEQ ID NO: 9897 - DNA, 22 bp, Artificial sequence
  Primer
gtgactcatgcatgagtcacgc

SEQ ID NO: 9898 - DNA, 22 bp, Artificial sequence
  Primer
aggactcatgcatgagtcctgc

SEQ ID NO: 9899 - DNA, 22 bp, Artificial sequence
  Primer
tggactcatgcatgagtccagc

SEQ ID NO: 9900 - DNA, 22 bp, Artificial sequence
  Primer
aggactcatgcatgagtcctcg

SEQ ID NO: 9901 - DNA, 22 bp, Artificial sequence
  Primer
tggactcatgcatgagtccacg

SEQ ID NO: 9902 - DNA, 22 bp, Artificial sequence
  Primer
ccgactcatgcatgagtcggtg

SEQ ID NO: 9903 - DNA, 22 bp, Artificial sequence
  Primer
ccgactcatgcatgagtcggag

SEQ ID NO: 9904 - DNA, 22 bp, Artificial sequence
  Primer
gggactcatgcatgagtcccgc

SEQ ID NO: 9905 - DNA, 22 bp, Artificial sequence
  Primer
gggactcatgcatgagtccctc

SEQ ID NO: 9906 - DNA, 22 bp, Artificial sequence
  Primer
gggactcatgcatgagtcccac

SEQ ID NO: 9907 - DNA, 22 bp, Artificial sequence
  Primer
  misc_feature (1)..(2): n is a, c, g, or t
  misc_feature (19)..(22): n is a, c, g, or t
nngactcatcgatgagtcnnnn

SEQ ID NO: 9908 - DNA, 22 bp, Artificial sequence
  Primer
cggactcatcgatgagtccgcc

SEQ ID NO: 9909 - DNA, 22 bp, Artificial sequence
  Primer
cggactcatcgatgagtccgct

SEQ ID NO: 9910 - DNA, 22 bp, Artificial sequence
  Primer
cggactcatcgatgagtccgtc

SEQ ID NO: 9911 - DNA, 22 bp, Artificial sequence
  Primer
aggactcatcgatgagtcctcc

SEQ ID NO: 9912 - DNA, 22 bp, Artificial sequence
  Primer
cagactcatcgatgagtctgcc

SEQ ID NO: 9913 - DNA, 22 bp, Artificial sequence
  Primer
cggactcatcgatgagtccgca

SEQ ID NO: 9914 - DNA, 22 bp, Artificial sequence
  Primer
cggactcatcgatgagtccgac

SEQ ID NO: 9915 - DNA, 22 bp, Artificial sequence
  Primer
tggactcatcgatgagtccacc

SEQ ID NO: 9916 - DNA, 22 bp, Artificial sequence
  Primer
ctgactcatcgatgagtcagcc

SEQ ID NO: 9917 - DNA, 22 bp, Artificial sequence
  Primer
ccgactcatcgatgagtcgggc

SEQ ID NO: 9918 - DNA, 22 bp, Artificial sequence
  Primer
ccgactcatcgatgagtcgggt

SEQ ID NO: 9919 - DNA, 22 bp, Artificial sequence
  Primer
ccgactcatcgatgagtcggtc

SEQ ID NO: 9920 - DNA, 22 bp, Artificial sequence
  Primer
acgactcatcgatgagtcgtgc

SEQ ID NO: 9921 - DNA, 22 bp, Artificial sequence
  Primer
cagactcatcgatgagtctggc

SEQ ID NO: 9922 - DNA, 22 bp, Artificial sequence
  Primer
ccgactcatcgatgagtcggga

SEQ ID NO: 9923 - DNA, 22 bp, Artificial sequence
  Primer
ccgactcatcgatgagtcggac

SEQ ID NO: 9924 - DNA, 22 bp, Artificial sequence
  Primer
ctgactcatcgatgagtcaggc

SEQ ID NO: 9925 - DNA, 22 bp, Artificial sequence
  Primer
gcgactcatcgatgagtcgccc

SEQ ID NO: 9926 - DNA, 22 bp, Artificial sequence
  Primer
gcgactcatcgatgagtcgcct

SEQ ID NO: 9927 - DNA, 22 bp, Artificial sequence
  Primer
gcgactcatcgatgagtcgctc

SEQ ID NO: 9928 - DNA, 22 bp, Artificial sequence
  Primer
acgactcatcgatgagtcgtcc

SEQ ID NO: 9929 - DNA, 22 bp, Artificial sequence
  Primer
gagactcatcgatgagtctccc

SEQ ID NO: 9930 - DNA, 22 bp, Artificial sequence
  Primer
gcgactcatcgatgagtcgcca

SEQ ID NO: 9931 - DNA, 22 bp, Artificial sequence
  Primer
gcgactcatcgatgagtcgcac

SEQ ID NO: 9932 - DNA, 22 bp, Artificial sequence
  Primer
gtgactcatcgatgagtcaccc

SEQ ID NO: 9933 - DNA, 22 bp, Artificial sequence
  Primer
gggactcatcgatgagtcccgt

SEQ ID NO: 9934 - DNA, 22 bp, Artificial sequence
  Primer
gggactcatcgatgagtccctg

SEQ ID NO: 9935 - DNA, 22 bp, Artificial sequence
  Primer
aggactcatcgatgagtcctgg

SEQ ID NO: 9936 - DNA, 22 bp, Artificial sequence
  Primer
gagactcatcgatgagtctcgg

SEQ ID NO: 9937 - DNA, 22 bp, Artificial sequence
  Primer
gggactcatcgatgagtcccga

SEQ ID NO: 9938 - DNA, 22 bp, Artificial sequence
  Primer
gggactcatcgatgagtcccag

SEQ ID NO: 9939 - DNA, 22 bp, Artificial sequence
  Primer
tggactcatcgatgagtccagg

SEQ ID NO: 9940 - DNA, 22 bp, Artificial sequence
  Primer
gtgactcatcgatgagtcacgg

SEQ ID NO: 9941 - DNA, 22 bp, Artificial sequence
  Primer
gcgactcatcgatgagtcgccg

SEQ ID NO: 9942 - DNA, 22 bp, Artificial sequence
  Primer
gcgactcatcgatgagtcgctg

SEQ ID NO: 9943 - DNA, 22 bp, Artificial sequence
  Primer
acgactcatcgatgagtcgtcg

SEQ ID NO: 9944 - DNA, 22 bp, Artificial sequence
  Primer
gagactcatcgatgagtctccg

SEQ ID NO: 9945 - DNA, 22 bp, Artificial sequence
  Primer
gcgactcatcgatgagtcgcag

SEQ ID NO: 9946 - DNA, 22 bp, Artificial sequence
  Primer
gtgactcatcgatgagtcaccg

SEQ ID NO: 9947 - DNA, 22 bp, Artificial sequence
  Primer
cggactcatcgatgagtccgtg

SEQ ID NO: 9948 - DNA, 22 bp, Artificial sequence
  Primer
cagactcatcgatgagtctggg

SEQ ID NO: 9949 - DNA, 22 bp, Artificial sequence
  Primer
cggactcatcgatgagtccgag

SEQ ID NO: 9950 - DNA, 22 bp, Artificial sequence
  Primer
ctgactcatcgatgagtcaggg

SEQ ID NO: 9951 - DNA, 22 bp, Artificial sequence
  Primer
acgactcatcgatgagtcgtgg

SEQ ID NO: 9952 - DNA, 22 bp, Artificial sequence
  Primer
ccgactcatcgatgagtcggct

SEQ ID NO: 9953 - DNA, 22 bp, Artificial sequence
  Primer
ccgactcatcgatgagtcggca

SEQ ID NO: 9954 - DNA, 22 bp, Artificial sequence
  Primer
gagactcatcgatgagtctcgc

SEQ ID NO: 9955 - DNA, 22 bp, Artificial sequence
  Primer
gtgactcatcgatgagtcacgc

SEQ ID NO: 9956 - DNA, 22 bp, Artificial sequence
  Primer
aggactcatcgatgagtcctgc

SEQ ID NO: 9957 - DNA, 22 bp, Artificial sequence
  Primer
tggactcatcgatgagtccagc

SEQ ID NO: 9958 - DNA, 22 bp, Artificial sequence
  Primer
aggactcatcgatgagtcctcg

SEQ ID NO: 9959 - DNA, 22 bp, Artificial sequence
  Primer
tggactcatcgatgagtccacg

SEQ ID NO: 9960 - DNA, 22 bp, Artificial sequence
  Primer
ccgactcatcgatgagtcggtg

SEQ ID NO: 9961 - DNA, 22 bp, Artificial sequence
  Primer
ccgactcatcgatgagtcggag

SEQ ID NO: 9962 - DNA, 22 bp, Artificial sequence
  Primer
gggactcatcgatgagtcccgc

SEQ ID NO: 9963 - DNA, 22 bp, Artificial sequence
  Primer
gggactcatcgatgagtccctc

SEQ ID NO: 9964 - DNA, 22 bp, Artificial sequence
  Primer
gggactcatcgatgagtcccac

SEQ ID NO: 9965 - DNA, 22 bp, Artificial sequence
  Primer
  misc_feature (1)..(2): n is a, c, g, or t
  misc_feature (19)..(22): n is a, c, g, or t
nngactcttataagagtcnnnn

SEQ ID NO: 9966 - DNA, 22 bp, Artificial sequence
  Primer
cggactcttataagagtccgcc

SEQ ID NO: 9967 - DNA, 22 bp, Artificial sequence
  Primer
cggactcttataagagtccgct

SEQ ID NO: 9968 - DNA, 22 bp, Artificial sequence
  Primer
cggactcttataagagtccgtc

SEQ ID NO: 9969 - DNA, 22 bp, Artificial sequence
  Primer
aggactcttataagagtcctcc

SEQ ID NO: 9970 - DNA, 22 bp, Artificial sequence
  Primer
cagactcttataagagtctgcc

SEQ ID NO: 9971 - DNA, 22 bp, Artificial sequence
  Primer
cggactcttataagagtccgca

SEQ ID NO: 9972 - DNA, 22 bp, Artificial sequence
  Primer
cggactcttataagagtccgac

SEQ ID NO: 9973 - DNA, 22 bp, Artificial sequence
  Primer
tggactcttataagagtccacc

SEQ ID NO: 9974 - DNA, 22 bp, Artificial sequence
  Primer
ctgactcttataagagtcagcc

SEQ ID NO: 9975 - DNA, 22 bp, Artificial sequence
  Primer
ccgactcttataagagtcgggc

SEQ ID NO: 9976 - DNA, 22 bp, Artificial sequence
  Primer
ccgactcttataagagtcgggt

SEQ ID NO: 9977 - DNA, 22 bp, Artificial sequence
  Primer
ccgactcttataagagtcggtc

SEQ ID NO: 9978 - DNA, 22 bp, Artificial sequence
  Primer
acgactcttataagagtcgtgc

SEQ ID NO: 9979 - DNA, 22 bp, Artificial sequence
  Primer
cagactcttataagagtctggc

SEQ ID NO: 9980 - DNA, 22 bp, Artificial sequence
  Primer
ccgactcttataagagtcggga

SEQ ID NO: 9981 - DNA, 22 bp, Artificial sequence
  Primer
ccgactcttataagagtcggac

SEQ ID NO: 9982 - DNA, 22 bp, Artificial sequence
  Primer
ctgactcttataagagtcaggc

SEQ ID NO: 9983 - DNA, 22 bp, Artificial sequence
  Primer
gcgactcttataagagtcgccc

SEQ ID NO: 9984 - DNA, 22 bp, Artificial sequence
  Primer
gcgactcttataagagtcgcct

SEQ ID NO: 9985 - DNA, 22 bp, Artificial sequence
  Primer
gcgactcttataagagtcgctc

SEQ ID NO: 9986 - DNA, 22 bp, Artificial sequence
  Primer
acgactcttataagagtcgtcc

SEQ ID NO: 9987 - DNA, 22 bp, Artificial sequence
  Primer
gagactcttataagagtctccc

SEQ ID NO: 9988 - DNA, 22 bp, Artificial sequence
  Primer
gcgactcttataagagtcgcca

SEQ ID NO: 9989 - DNA, 22 bp, Artificial sequence
  Primer
gcgactcttataagagtcgcac

SEQ ID NO: 9990 - DNA, 22 bp, Artificial sequence
  Primer
gtgactcttataagagtcaccc

SEQ ID NO: 9991 - DNA, 22 bp, Artificial sequence
  Primer
gggactcttataagagtcccgt

SEQ ID NO: 9992 - DNA, 22 bp, Artificial sequence
  Primer
gggactcttataagagtccctg

SEQ ID NO: 9993 - DNA, 22 bp, Artificial sequence
  Primer
aggactcttataagagtcctgg

SEQ ID NO: 9994 - DNA, 22 bp, Artificial sequence
  Primer
gagactcttataagagtctcgg

SEQ ID NO: 9995 - DNA, 22 bp, Artificial sequence
  Primer
gggactcttataagagtcccga

SEQ ID NO: 9996 - DNA, 22 bp, Artificial sequence
  Primer
gggactcttataagagtcccag

SEQ ID NO: 9997 - DNA, 22 bp, Artificial sequence
  Primer
tggactcttataagagtccagg

SEQ ID NO: 9998 - DNA, 22 bp, Artificial sequence
  Primer
gtgactcttataagagtcacgg

SEQ ID NO: 9999 - DNA, 22 bp, Artificial sequence
  Primer
gcgactcttataagagtcgccg

SEQ ID NO: 10000 - DNA, 22 bp, Artificial sequence
  Primer
gcgactcttataagagtcgctg

SEQ ID NO: 10001 - DNA, 22 bp, Artificial sequence
  Primer
acgactcttataagagtcgtcg

SEQ ID NO: 10002 - DNA, 22 bp, Artificial sequence
  Primer
gagactcttataagagtctccg

SEQ ID NO: 10003 - DNA, 22 bp, Artificial sequence
  Primer
gcgactcttataagagtcgcag

SEQ ID NO: 10004 - DNA, 22 bp, Artificial sequence
  Primer
gtgactcttataagagtcaccg

SEQ ID NO: 10005 - DNA, 22 bp, Artificial sequence
  Primer
cggactcttataagagtccgtg

SEQ ID NO: 10006 - DNA, 22 bp, Artificial sequence
  Primer
cagactcttataagagtctggg

SEQ ID NO: 10007 - DNA, 22 bp, Artificial sequence
  Primer
cggactcttataagagtccgag

SEQ ID NO: 10008 - DNA, 22 bp, Artificial sequence
  Primer
ctgactcttataagagtcaggg

SEQ ID NO: 10009 - DNA, 22 bp, Artificial sequence
  Primer
acgactcttataagagtcgtgg

SEQ ID NO: 10010 - DNA, 22 bp, Artificial sequence
  Primer
ccgactcttataagagtcggct

SEQ ID NO: 10011 - DNA, 22 bp, Artificial sequence
  Primer
ccgactcttataagagtcggca

SEQ ID NO: 10012 - DNA, 22 bp, Artificial sequence
  Primer
gagactcttataagagtctcgc

SEQ ID NO: 10013 - DNA, 22 bp, Artificial sequence
  Primer
gtgactcttataagagtcacgc

SEQ ID NO: 10014 - DNA, 22 bp, Artificial sequence
  Primer
aggactcttataagagtcctgc

SEQ ID NO: 10015 - DNA, 22 bp, Artificial sequence
  Primer
tggactcttataagagtccagc

SEQ ID NO: 10016 - DNA, 22 bp, Artificial sequence
  Primer
aggactcttataagagtcctcg

SEQ ID NO: 10017 - DNA, 22 bp, Artificial sequence
  Primer
tggactcttataagagtccacg

SEQ ID NO: 10018 - DNA, 22 bp, Artificial sequence
  Primer
ccgactcttataagagtcggtg

SEQ ID NO: 10019 - DNA, 22 bp, Artificial sequence
  Primer
ccgactcttataagagtcggag

SEQ ID NO: 10020 - DNA, 22 bp, Artificial sequence
  Primer
gggactcttataagagtcccgc

SEQ ID NO: 10021 - DNA, 22 bp, Artificial sequence
  Primer
gggactcttataagagtccctc

SEQ ID NO: 10022 - DNA, 22 bp, Artificial sequence
  Primer
gggactcttataagagtcccac

SEQ ID NO: 10023 - DNA, 22 bp, Artificial sequence
  Primer
  misc_feature (1)..(2): n is a, c, g, or t
  misc_feature (19)..(22): n is a, c, g, or t
nngactctttaaagagtcnnnn

SEQ ID NO: 10024 - DNA, 22 bp, Artificial sequence
  Primer
cggactctttaaagagtccgcc

SEQ ID NO: 10025 - DNA, 22 bp, Artificial sequence
  Primer
cggactctttaaagagtccgct

SEQ ID NO: 10026 - DNA, 22 bp, Artificial sequence
  Primer
cggactctttaaagagtccgtc

SEQ ID NO: 10027 - DNA, 22 bp, Artificial sequence
  Primer
aggactctttaaagagtcctcc

SEQ ID NO: 10028 - DNA, 22 bp, Artificial sequence
  Primer
cagactctttaaagagtctgcc

SEQ ID NO: 10029 - DNA, 22 bp, Artificial sequence
  Primer
cggactctttaaagagtccgca

SEQ ID NO: 10030 - DNA, 22 bp, Artificial sequence
  Primer
cggactctttaaagagtccgac

SEQ ID NO: 10031 - DNA, 22 bp, Artificial sequence
  Primer
tggactctttaaagagtccacc

SEQ ID NO: 10032 - DNA, 22 bp, Artificial sequence
  Primer
ctgactctttaaagagtcagcc

SEQ ID NO: 10033 - DNA, 22 bp, Artificial sequence
  Primer
ccgactctttaaagagtcgggc

SEQ ID NO: 10034 - DNA, 22 bp, Artificial sequence
  Primer
ccgactctttaaagagtcgggt

SEQ ID NO: 10035 - DNA, 22 bp, Artificial sequence
  Primer
ccgactctttaaagagtcggtc

SEQ ID NO: 10036 - DNA, 22 bp, Artificial sequence
  Primer
acgactctttaaagagtcgtgc

SEQ ID NO: 10037 - DNA, 22 bp, Artificial sequence
  Primer
cagactctttaaagagtctggc

SEQ ID NO: 10038 - DNA, 22 bp, Artificial sequence
  Primer
ccgactctttaaagagtcggga

SEQ ID NO: 10039 - DNA, 22 bp, Artificial sequence
  Primer
ccgactctttaaagagtcggac

SEQ ID NO: 10040 - DNA, 22 bp, Artificial sequence
  Primer
ctgactctttaaagagtcaggc

SEQ ID NO: 10041 - DNA, 22 bp, Artificial sequence
  Primer
gcgactctttaaagagtcgccc

SEQ ID NO: 10042 - DNA, 22 bp, Artificial sequence
  Primer
gcgactctttaaagagtcgcct

SEQ ID NO: 10043 - DNA, 22 bp, Artificial sequence
  Primer
gcgactctttaaagagtcgctc

SEQ ID NO: 10044 - DNA, 22 bp, Artificial sequence
  Primer
acgactctttaaagagtcgtcc

SEQ ID NO: 10045 - DNA, 22 bp, Artificial sequence
  Primer
gagactctttaaagagtctccc

SEQ ID NO: 10046 - DNA, 22 bp, Artificial sequence
  Primer
gcgactctttaaagagtcgcca

SEQ ID NO: 10047 - DNA, 22 bp, Artificial sequence
  Primer
gcgactctttaaagagtcgcac

SEQ ID NO: 10048 - DNA, 22 bp, Artificial sequence
  Primer
gtgactctttaaagagtcaccc

SEQ ID NO: 10049 - DNA, 22 bp, Artificial sequence
  Primer
gggactctttaaagagtcccgt

SEQ ID NO: 10050 - DNA, 22 bp, Artificial sequence
  Primer
gggactctttaaagagtccctg

SEQ ID NO: 10051 - DNA, 22 bp, Artificial sequence
  Primer
aggactctttaaagagtcctgg

SEQ ID NO: 10052 - DNA, 22 bp, Artificial sequence
  Primer
gagactctttaaagagtctcgg

SEQ ID NO: 10053 - DNA, 22 bp, Artificial sequence
  Primer
gggactctttaaagagtcccga

SEQ ID NO: 10054 - DNA, 22 bp, Artificial sequence
  Primer
gggactctttaaagagtcccag

SEQ ID NO: 10055 - DNA, 22 bp, Artificial sequence
  Primer
tggactctttaaagagtccagg

SEQ ID NO: 10056 - DNA, 22 bp, Artificial sequence
  Primer
gtgactctttaaagagtcacgg

SEQ ID NO: 10057 - DNA, 22 bp, Artificial sequence
  Primer
gcgactctttaaagagtcgccg

SEQ ID NO: 10058 - DNA, 22 bp, Artificial sequence
  Primer
gcgactctttaaagagtcgctg

SEQ ID NO: 10059 - DNA, 22 bp, Artificial sequence
  Primer
acgactctttaaagagtcgtcg

SEQ ID NO: 10060 - DNA, 22 bp, Artificial sequence
  Primer
gagactctttaaagagtctccg

SEQ ID NO: 10061 - DNA, 22 bp, Artificial sequence
  Primer
gcgactctttaaagagtcgcag

SEQ ID NO: 10062 - DNA, 22 bp, Artificial sequence
  Primer
gtgactctttaaagagtcaccg

SEQ ID NO: 10063 - DNA, 22 bp, Artificial sequence
  Primer
cggactctttaaagagtccgtg

SEQ ID NO: 10064 - DNA, 22 bp, Artificial sequence
  Primer
cagactctttaaagagtctggg

SEQ ID NO: 10065 - DNA, 22 bp, Artificial sequence
  Primer
cggactctttaaagagtccgag

SEQ ID NO: 10066 - DNA, 22 bp, Artificial sequence
  Primer
ctgactctttaaagagtcaggg

SEQ ID NO: 10067 - DNA, 22 bp, Artificial sequence
  Primer
acgactctttaaagagtcgtgg

SEQ ID NO: 10068 - DNA, 22 bp, Artificial sequence
  Primer
ccgactctttaaagagtcggct

SEQ ID NO: 10069 - DNA, 22 bp, Artificial sequence
  Primer
ccgactctttaaagagtcggca

SEQ ID NO: 10070 - DNA, 22 bp, Artificial sequence
  Primer
gagactctttaaagagtctcgc

SEQ ID NO: 10071 - DNA, 22 bp, Artificial sequence
  Primer
gtgactctttaaagagtcacgc

SEQ ID NO: 10072 - DNA, 22 bp, Artificial sequence
  Primer
aggactctttaaagagtcctgc

SEQ ID NO: 10073 - DNA, 22 bp, Artificial sequence
  Primer
tggactctttaaagagtccagc

SEQ ID NO: 10074 - DNA, 22 bp, Artificial sequence
  Primer
aggactctttaaagagtcctcg

SEQ ID NO: 10075 - DNA, 22 bp, Artificial sequence
  Primer
tggactctttaaagagtccacg

SEQ ID NO: 10076 - DNA, 22 bp, Artificial sequence
  Primer
ccgactctttaaagagtcggtg

SEQ ID NO: 10077 - DNA, 22 bp, Artificial sequence
  Primer
ccgactctttaaagagtcggag

SEQ ID NO: 10078 - DNA, 22 bp, Artificial sequence
  Primer
gggactctttaaagagtcccgc

SEQ ID NO: 10079 - DNA, 22 bp, Artificial sequence
  Primer
gggactctttaaagagtccctc

SEQ ID NO: 10080 - DNA, 22 bp, Artificial sequence
  Primer
gggactctttaaagagtcccac

SEQ ID NO: 10081 - DNA, 22 bp, Artificial sequence
  Primer
  misc_feature (1)..(2): n is a, c, g, or t
  misc_feature (19)..(22): n is a, c, g, or t
nngactcttgcaagagtcnnnn

SEQ ID NO: 10082 - DNA, 22 bp, Artificial sequence
  Primer
cggactcttgcaagagtccgcc

SEQ ID NO: 10083 - DNA, 22 bp, Artificial sequence
  Primer
cggactcttgcaagagtccgct

SEQ ID NO: 10084 - DNA, 22 bp, Artificial sequence
  Primer
cggactcttgcaagagtccgtc

SEQ ID NO: 10085 - DNA, 22 bp, Artificial sequence
  Primer
aggactcttgcaagagtcctcc

SEQ ID NO: 10086 - DNA, 22 bp, Artificial sequence
  Primer
cagactcttgcaagagtctgcc

SEQ ID NO: 10087 - DNA, 22 bp, Artificial sequence
  Primer
cggactcttgcaagagtccgca

SEQ ID NO: 10088 - DNA, 22 bp, Artificial sequence
  Primer
cggactcttgcaagagtccgac

SEQ ID NO: 10089 - DNA, 22 bp, Artificial sequence
  Primer
tggactcttgcaagagtccacc

SEQ ID NO: 10090 - DNA, 22 bp, Artificial sequence
  Primer
ctgactcttgcaagagtcagcc

SEQ ID NO: 10091 - DNA, 22 bp, Artificial sequence
  Primer
ccgactcttgcaagagtcgggc

SEQ ID NO: 10092 - DNA, 22 bp, Artificial sequence
  Primer
ccgactcttgcaagagtcgggt

SEQ ID NO: 10093 - DNA, 22 bp, Artificial sequence
  Primer
ccgactcttgcaagagtcggtc

SEQ ID NO: 10094 - DNA, 22 bp, Artificial sequence
  Primer
acgactcttgcaagagtcgtgc

SEQ ID NO: 10095 - DNA, 22 bp, Artificial sequence
  Primer
cagactcttgcaagagtctggc

SEQ ID NO: 10096 - DNA, 22 bp, Artificial sequence
  Primer
ccgactcttgcaagagtcggga

SEQ ID NO: 10097 - DNA, 22 bp, Artificial sequence
  Primer
ccgactcttgcaagagtcggac

SEQ ID NO: 10098 - DNA, 22 bp, Artificial sequence
  Primer
ctgactcttgcaagagtcaggc

SEQ ID NO: 10099 - DNA, 22 bp, Artificial sequence
  Primer
gcgactcttgcaagagtcgccc

SEQ ID NO: 10100 - DNA, 22 bp, Artificial sequence
  Primer
gcgactcttgcaagagtcgcct

SEQ ID NO: 10101 - DNA, 22 bp, Artificial sequence
  Primer
gcgactcttgcaagagtcgctc

SEQ ID NO: 10102 - DNA, 22 bp, Artificial sequence
  Primer
acgactcttgcaagagtcgtcc

SEQ ID NO: 10103 - DNA, 22 bp, Artificial sequence
  Primer
gagactcttgcaagagtctccc

SEQ ID NO: 10104 - DNA, 22 bp, Artificial sequence
  Primer
gcgactcttgcaagagtcgcca

SEQ ID NO: 10105 - DNA, 22 bp, Artificial sequence
  Primer
gcgactcttgcaagagtcgcac

SEQ ID NO: 10106 - DNA, 22 bp, Artificial sequence
  Primer
gtgactcttgcaagagtcaccc

SEQ ID NO: 10107 - DNA, 22 bp, Artificial sequence
  Primer
gggactcttgcaagagtcccgt

SEQ ID NO: 10108 - DNA, 22 bp, Artificial sequence
  Primer
gggactcttgcaagagtccctg

SEQ ID NO: 10109 - DNA, 22 bp, Artificial sequence
  Primer
aggactcttgcaagagtcctgg

SEQ ID NO: 10110 - DNA, 22 bp, Artificial sequence
  Primer
gagactcttgcaagagtctcgg

SEQ ID NO: 10111 - DNA, 22 bp, Artificial sequence
  Primer
gggactcttgcaagagtcccga

SEQ ID NO: 10112 - DNA, 22 bp, Artificial sequence
  Primer
gggactcttgcaagagtcccag

SEQ ID NO: 10113 - DNA, 22 bp, Artificial sequence
  Primer
tggactcttgcaagagtccagg

SEQ ID NO: 10114 - DNA, 22 bp, Artificial sequence
  Primer
gtgactcttgcaagagtcacgg

SEQ ID NO: 10115 - DNA, 22 bp, Artificial sequence
  Primer
gcgactcttgcaagagtcgccg

SEQ ID NO: 10116 - DNA, 22 bp, Artificial sequence
  Primer
gcgactcttgcaagagtcgctg

SEQ ID NO: 10117 - DNA, 22 bp, Artificial sequence
  Primer
acgactcttgcaagagtcgtcg

SEQ ID NO: 10118 - DNA, 22 bp, Artificial sequence
  Primer
gagactcttgcaagagtctccg

SEQ ID NO: 10119 - DNA, 22 bp, Artificial sequence
  Primer
gcgactcttgcaagagtcgcag

SEQ ID NO: 10120 - DNA, 22 bp, Artificial sequence
  Primer
gtgactcttgcaagagtcaccg

SEQ ID NO: 10121 - DNA, 22 bp, Artificial sequence
  Primer
cggactcttgcaagagtccgtg

SEQ ID NO: 10122 - DNA, 22 bp, Artificial sequence
  Primer
cagactcttgcaagagtctggg

SEQ ID NO: 10123 - DNA, 22 bp, Artificial sequence
  Primer
cggactcttgcaagagtccgag

SEQ ID NO: 10124 - DNA, 22 bp, Artificial sequence
  Primer
ctgactcttgcaagagtcaggg

SEQ ID NO: 10125 - DNA, 22 bp, Artificial sequence
  Primer
acgactcttgcaagagtcgtgg

SEQ ID NO: 10126 - DNA, 22 bp, Artificial sequence
  Primer
ccgactcttgcaagagtcggct

SEQ ID NO: 10127 - DNA, 22 bp, Artificial sequence
  Primer
ccgactcttgcaagagtcggca

SEQ ID NO: 10128 - DNA, 22 bp, Artificial sequence
  Primer
gagactcttgcaagagtctcgc

SEQ ID NO: 10129 - DNA, 22 bp, Artificial sequence
  Primer
gtgactcttgcaagagtcacgc

SEQ ID NO: 10130 - DNA, 22 bp, Artificial sequence
  Primer
aggactcttgcaagagtcctgc

SEQ ID NO: 10131 - DNA, 22 bp, Artificial sequence
  Primer
tggactcttgcaagagtccagc

SEQ ID NO: 10132 - DNA, 22 bp, Artificial sequence
  Primer
aggactcttgcaagagtcctcg

SEQ ID NO: 10133 - DNA, 22 bp, Artificial sequence
  Primer
tggactcttgcaagagtccacg

SEQ ID NO: 10134 - DNA, 22 bp, Artificial sequence
  Primer
ccgactcttgcaagagtcggtg

SEQ ID NO: 10135 - DNA, 22 bp, Artificial sequence
  Primer
ccgactcttgcaagagtcggag

SEQ ID NO: 10136 - DNA, 22 bp, Artificial sequence
  Primer
gggactcttgcaagagtcccgc

SEQ ID NO: 10137 - DNA, 22 bp, Artificial sequence
  Primer
gggactcttgcaagagtccctc

SEQ ID NO: 10138 - DNA, 22 bp, Artificial sequence
  Primer
gggactcttgcaagagtcccac

SEQ ID NO: 10139 - DNA, 22 bp, Artificial sequence
  Primer
  misc_feature (1)..(2): n is a, c, g, or t
  misc_feature (19)..(22): n is a, c, g, or t
nngactcttcgaagagtcnnnn

SEQ ID NO: 10140 - DNA, 22 bp, Artificial sequence
  Primer
cggactcttcgaagagtccgcc

SEQ ID NO: 10141 - DNA, 22 bp, Artificial sequence
  Primer
cggactcttcgaagagtccgct

SEQ ID NO: 10142 - DNA, 22 bp, Artificial sequence
  Primer
cggactcttcgaagagtccgtc

SEQ ID NO: 10143 - DNA, 22 bp, Artificial sequence
  Primer
aggactcttcgaagagtcctcc

SEQ ID NO: 10144 - DNA, 22 bp, Artificial sequence
  Primer
cagactcttcgaagagtctgcc

SEQ ID NO: 10145 - DNA, 22 bp, Artificial sequence
  Primer
cggactcttcgaagagtccgca

SEQ ID NO: 10146 - DNA, 22 bp, Artificial sequence
  Primer
cggactcttcgaagagtccgac

SEQ ID NO: 10147 - DNA, 22 bp, Artificial sequence
  Primer
tggactcttcgaagagtccacc

SEQ ID NO: 10148 - DNA, 22 bp, Artificial sequence
  Primer
ctgactcttcgaagagtcagcc

SEQ ID NO: 10149 - DNA, 22 bp, Artificial sequence
  Primer
ccgactcttcgaagagtcgggc

SEQ ID NO: 10150 - DNA, 22 bp, Artificial sequence
  Primer
ccgactcttcgaagagtcgggt

SEQ ID NO: 10151 - DNA, 22 bp, Artificial sequence
  Primer
ccgactcttcgaagagtcggtc

SEQ ID NO: 10152 - DNA, 22 bp, Artificial sequence
  Primer
acgactcttcgaagagtcgtgc

SEQ ID NO: 10153 - DNA, 22 bp, Artificial sequence
  Primer
cagactcttcgaagagtctggc

SEQ ID NO: 10154 - DNA, 22 bp, Artificial sequence
  Primer
ccgactcttcgaagagtcggga

SEQ ID NO: 10155 - DNA, 22 bp, Artificial sequence
  Primer
ccgactcttcgaagagtcggac

SEQ ID NO: 10156 - DNA, 22 bp, Artificial sequence
  Primer
ctgactcttcgaagagtcaggc

SEQ ID NO: 10157 - DNA, 22 bp, Artificial sequence
  Primer
gcgactcttcgaagagtcgccc

SEQ ID NO: 10158 - DNA, 22 bp, Artificial sequence
  Primer
gcgactcttcgaagagtcgcct

SEQ ID NO: 10159 - DNA, 22 bp, Artificial sequence
  Primer
gcgactcttcgaagagtcgctc

SEQ ID NO: 10160 - DNA, 22 bp, Artificial sequence
  Primer
acgactcttcgaagagtcgtcc

SEQ ID NO: 10161 - DNA, 22 bp, Artificial sequence
  Primer
gagactcttcgaagagtctccc

SEQ ID NO: 10162 - DNA, 22 bp, Artificial sequence
  Primer
gcgactcttcgaagagtcgcca

SEQ ID NO: 10163 - DNA, 22 bp, Artificial sequence
  Primer
gcgactcttcgaagagtcgcac

SEQ ID NO: 10164 - DNA, 22 bp, Artificial sequence
  Primer
gtgactcttcgaagagtcaccc

SEQ ID NO: 10165 - DNA, 22 bp, Artificial sequence
  Primer
gggactcttcgaagagtcccgt

SEQ ID NO: 10166 - DNA, 22 bp, Artificial sequence
  Primer
gggactcttcgaagagtccctg

SEQ ID NO: 10167 - DNA, 22 bp, Artificial sequence
  Primer
aggactcttcgaagagtcctgg

SEQ ID NO: 10168 - DNA, 22 bp, Artificial sequence
  Primer
gagactcttcgaagagtctcgg

SEQ ID NO: 10169 - DNA, 22 bp, Artificial sequence
  Primer
gggactcttcgaagagtcccga

SEQ ID NO: 10170 - DNA, 22 bp, Artificial sequence
  Primer
gggactcttcgaagagtcccag

SEQ ID NO: 10171 - DNA, 22 bp, Artificial sequence
  Primer
tggactcttcgaagagtccagg

SEQ ID NO: 10172 - DNA, 22 bp, Artificial sequence
  Primer
gtgactcttcgaagagtcacgg

SEQ ID NO: 10173 - DNA, 22 bp, Artificial sequence
  Primer
gcgactcttcgaagagtcgccg

SEQ ID NO: 10174 - DNA, 22 bp, Artificial sequence
  Primer
gcgactcttcgaagagtcgctg

SEQ ID NO: 10175 - DNA, 22 bp, Artificial sequence
  Primer
acgactcttcgaagagtcgtcg

SEQ ID NO: 10176 - DNA, 22 bp, Artificial sequence
  Primer
gagactcttcgaagagtctccg

SEQ ID NO: 10177 - DNA, 22 bp, Artificial sequence
  Primer
gcgactcttcgaagagtcgcag

SEQ ID NO: 10178 - DNA, 22 bp, Artificial sequence
  Primer
gtgactcttcgaagagtcaccg

SEQ ID NO: 10179 - DNA, 22 bp, Artificial sequence
  Primer
cggactcttcgaagagtccgtg

SEQ ID NO: 10180 - DNA, 22 bp, Artificial sequence
  Primer
cagactcttcgaagagtctggg

SEQ ID NO: 10181 - DNA, 22 bp, Artificial sequence
  Primer
cggactcttcgaagagtccgag

SEQ ID NO: 10182 - DNA, 22 bp, Artificial sequence
  Primer
ctgactcttcgaagagtcaggg

SEQ ID NO: 10183 - DNA, 22 bp, Artificial sequence
  Primer
acgactcttcgaagagtcgtgg

SEQ ID NO: 10184 - DNA, 22 bp, Artificial sequence
  Primer
ccgactcttcgaagagtcggct

SEQ ID NO: 10185 - DNA, 22 bp, Artificial sequence
  Primer
ccgactcttcgaagagtcggca

SEQ ID NO: 10186 - DNA, 22 bp, Artificial sequence
  Primer
gagactcttcgaagagtctcgc

SEQ ID NO: 10187 - DNA, 22 bp, Artificial sequence
  Primer
gtgactcttcgaagagtcacgc

SEQ ID NO: 10188 - DNA, 22 bp, Artificial sequence
  Primer
aggactcttcgaagagtcctgc

SEQ ID NO: 10189 - DNA, 22 bp, Artificial sequence
  Primer
tggactcttcgaagagtccagc

SEQ ID NO: 10190 - DNA, 22 bp, Artificial sequence
  Primer
aggactcttcgaagagtcctcg

SEQ ID NO: 10191 - DNA, 22 bp, Artificial sequence
  Primer
tggactcttcgaagagtccacg

SEQ ID NO: 10192 - DNA, 22 bp, Artificial sequence
  Primer
ccgactcttcgaagagtcggtg

SEQ ID NO: 10193 - DNA, 22 bp, Artificial sequence
  Primer
ccgactcttcgaagagtcggag

SEQ ID NO: 10194 - DNA, 22 bp, Artificial sequence
  Primer
gggactcttcgaagagtcccgc

SEQ ID NO: 10195 - DNA, 22 bp, Artificial sequence
  Primer
gggactcttcgaagagtccctc

SEQ ID NO: 10196 - DNA, 22 bp, Artificial sequence
  Primer
gggactcttcgaagagtcccac

SEQ ID NO: 10197 - DNA, 18 bp, Artificial sequence
  Primer
  misc_feature (1)..(1): n is a, c, g, or t
  misc_feature (18)..(18): n is a, c, g, or t
ngactccgatcggagtcn

SEQ ID NO: 10198 - DNA, 18 bp, Artificial sequence
  Primer
ggactccgatcggagtcc

SEQ ID NO: 10199 - DNA, 18 bp, Artificial sequence
  Primer
agactccgatcggagtct

SEQ ID NO: 10200 - DNA, 18 bp, Artificial sequence
  Primer
tgactccgatcggagtca

SEQ ID NO: 10201 - DNA, 18 bp, Artificial sequence
  Primer
cgactccgatcggagtcg

SEQ ID NO: 10202 - DNA, 18 bp, Artificial sequence
  Primer
  misc_feature (1)..(1): n is a, c, g, or t
  misc_feature (18)..(18): n is a, c, g, or t
ngactcgtgcacgagtcn

SEQ ID NO: 10203 - DNA, 18 bp, Artificial sequence
  Primer
ggactcgtgcacgagtcc

SEQ ID NO: 10204 - DNA, 18 bp, Artificial sequence
  Primer
agactcgtgcacgagtct

SEQ ID NO: 10205 - DNA, 18 bp, Artificial sequence
  Primer
tgactcgtgcacgagtca

SEQ ID NO: 10206 - DNA, 18 bp, Artificial sequence
  Primer
cgactcgtgcacgagtcg

SEQ ID NO: 10207 - DNA, 18 bp, Artificial sequence
  Primer
  misc_feature (1)..(1): n is a, c, g, or t
  misc_feature (18)..(18): n is a, c, g, or t
ngactccccggggagtcn

SEQ ID NO: 10208 - DNA, 18 bp, Artificial sequence
  Primer
ggactccccggggagtcc

SEQ ID NO: 10209 - DNA, 18 bp, Artificial sequence
  Primer
agactccccggggagtct

SEQ ID NO: 10210 - DNA, 18 bp, Artificial sequence
  Primer
tgactccccggggagtca

SEQ ID NO: 10211 - DNA, 18 bp, Artificial sequence
  Primer
cgactccccggggagtcg

SEQ ID NO: 10212 - DNA, 18 bp, Artificial sequence
  Primer
  misc_feature (1)..(1): n is a, c, g, or t
  misc_feature (18)..(18): n is a, c, g, or t
ngactcggtaccgagtcn

SEQ ID NO: 10213 - DNA, 18 bp, Artificial sequence
  Primer
ggactcggtaccgagtcc

SEQ ID NO: 10214 - DNA, 18 bp, Artificial sequence
  Primer
agactcggtaccgagtct

SEQ ID NO: 10215 - DNA, 18 bp, Artificial sequence
  Primer
tgactcggtaccgagtca

SEQ ID NO: 10216 - DNA, 18 bp, Artificial sequence
  Primer
cgactcggtaccgagtcg

SEQ ID NO: 10217 - DNA, 18 bp, Artificial sequence
  Primer
  misc_feature (1)..(1): n is a, c, g, or t
  misc_feature (18)..(18): n is a, c, g, or t
ngactcaccggtgagtcn

SEQ ID NO: 10218 - DNA, 18 bp, Artificial sequence
  Primer
ggactcaccggtgagtcc

SEQ ID NO: 10219 - DNA, 18 bp, Artificial sequence
  Primer
agactcaccggtgagtct

SEQ ID NO: 10220 - DNA, 18 bp, Artificial sequence
  Primer
tgactcaccggtgagtca

SEQ ID NO: 10221 - DNA, 18 bp, Artificial sequence
  Primer
cgactcaccggtgagtcg

SEQ ID NO: 10222 - DNA, 18 bp, Artificial sequence
  Primer
  misc_feature (1)..(1): n is a, c, g, or t
  misc_feature (18)..(18): n is a, c, g, or t
ngactccatatggagtcn

SEQ ID NO: 10223 - DNA, 18 bp, Artificial sequence
  Primer
ggactccatatggagtcc

SEQ ID NO: 10224 - DNA, 18 bp, Artificial sequence
  Primer
cgactccatatggagtcg

SEQ ID NO: 10225 - DNA, 18 bp, Artificial sequence
  Primer
  misc_feature (1)..(1): n is a, c, g, or t
  misc_feature (18)..(18): n is a, c, g, or t
ngactcgttaacgagtcn

SEQ ID NO: 10226 - DNA, 18 bp, Artificial sequence
  Primer
ggactcgttaacgagtcc

SEQ ID NO: 10227 - DNA, 18 bp, Artificial sequence
  Primer
cgactcgttaacgagtcg

SEQ ID NO: 10228 - DNA, 18 bp, Artificial sequence
  Primer
  misc_feature (1)..(1): n is a, c, g, or t
  misc_feature (18)..(18): n is a, c, g, or t
ngactctctagagagtcn

SEQ ID NO: 10229 - DNA, 18 bp, Artificial sequence
  Primer
ggactctctagagagtcc

SEQ ID NO: 10230 - DNA, 18 bp, Artificial sequence
  Primer
cgactctctagagagtcg

SEQ ID NO: 10231 - DNA, 18 bp, Artificial sequence
  Primer
  misc_feature (1)..(1): n is a, c, g, or t
  misc_feature (18)..(18): n is a, c, g, or t
ngactcatgcatgagtcn

SEQ ID NO: 10232 - DNA, 18 bp, Artificial sequence
  Primer
ggactcatgcatgagtcc

SEQ ID NO: 10233 - DNA, 18 bp, Artificial sequence
  Primer
tgactcatgcatgagtca

SEQ ID NO: 10234 - DNA, 18 bp, Artificial sequence
  Primer
cgactcatgcatgagtcg

SEQ ID NO: 10235 - DNA, 18 bp, Artificial sequence
  Primer
  misc_feature (1)..(1): n is a, c, g, or t
  misc_feature (18)..(18): n is a, c, g, or t
ngactcactagtgagtcn

SEQ ID NO: 10236 - DNA, 18 bp, Artificial sequence
  Primer
cgactcactagtgagtcg

SEQ ID NO: 10237 - DNA, 18 bp, Artificial sequence
  Primer
  misc_feature (1)..(1): n is a, c, g, or t
  misc_feature (18)..(18): n is a, c, g, or t
ngactccgtacggagtcn

SEQ ID NO: 10238 - DNA, 18 bp, Artificial sequence
  Primer
ggactccgtacggagtcc

SEQ ID NO: 10239 - DNA, 18 bp, Artificial sequence
  Primer
agactccgtacggagtct

SEQ ID NO: 10240 - DNA, 18 bp, Artificial sequence
  Primer
tgactccgtacggagtca

SEQ ID NO: 10241 - DNA, 18 bp, Artificial sequence
  Primer
cgactccgtacggagtcg

SEQ ID NO: 10242 - DNA, 18 bp, Artificial sequence
  Primer
  misc_feature (1)..(1): n is a, c, g, or t
  misc_feature (18)..(18): n is a, c, g, or t
ngactcctgcaggagtcn

SEQ ID NO: 10243 - DNA, 18 bp, Artificial sequence
  Primer
ggactcctgcaggagtcc

SEQ ID NO: 10244 - DNA, 18 bp, Artificial sequence
  Primer
agactcctgcaggagtct

SEQ ID NO: 10245 - DNA, 18 bp, Artificial sequence
  Primer
tgactcctgcaggagtca

SEQ ID NO: 10246 - DNA, 18 bp, Artificial sequence
  Primer
cgactcctgcaggagtcg

SEQ ID NO: 10247 - DNA, 18 bp, Artificial sequence
  Primer
  misc_feature (1)..(1): n is a, c, g, or t
  misc_feature (18)..(18): n is a, c, g, or t
ngactcgtcgacgagtcn

SEQ ID NO: 10248 - DNA, 18 bp, Artificial sequence
  Primer
ggactcgtcgacgagtcc

SEQ ID NO: 10249 - DNA, 18 bp, Artificial sequence
  Primer
agactcgtcgacgagtct

SEQ ID NO: 10250 - DNA, 18 bp, Artificial sequence
  Primer
tgactcgtcgacgagtca

SEQ ID NO: 10251 - DNA, 18 bp, Artificial sequence
  Primer
cgactcgtcgacgagtcg

SEQ ID NO: 10252 - DNA, 18 bp, Artificial sequence
  Primer
  misc_feature (1)..(1): n is a, c, g, or t
  misc_feature (18)..(18): n is a, c, g, or t
ngactcagcgctgagtcn

SEQ ID NO: 10253 - DNA, 18 bp, Artificial sequence
  Primer
ggactcagcgctgagtcc

SEQ ID NO: 10254 - DNA, 18 bp, Artificial sequence
  Primer
agactcagcgctgagtct

SEQ ID NO: 10255 - DNA, 18 bp, Artificial sequence
  Primer
tgactcagcgctgagtca

SEQ ID NO: 10256 - DNA, 18 bp, Artificial sequence
  Primer
cgactcagcgctgagtcg

SEQ ID NO: 10257 - DNA, 18 bp, Artificial sequence
  Primer
  misc_feature (1)..(1): n is a, c, g, or t
  misc_feature (18)..(18): n is a, c, g, or t
ngactcggcgccgagtcn

SEQ ID NO: 10258 - DNA, 18 bp, Artificial sequence
  Primer
ggactcggcgccgagtcc

SEQ ID NO: 10259 - DNA, 18 bp, Artificial sequence
  Primer
agactcggcgccgagtct

SEQ ID NO: 10260 - DNA, 18 bp, Artificial sequence
  Primer
tgactcggcgccgagtca

SEQ ID NO: 10261 - DNA, 18 bp, Artificial sequence
  Primer
cgactcggcgccgagtcg

SEQ ID NO: 10262 - DNA, 18 bp, Artificial sequence
  Primer
  misc_feature (1)..(1): n is a, c, g, or t
  misc_feature (18)..(18): n is a, c, g, or t
ngactcacatgtgagtcn

SEQ ID NO: 10263 - DNA, 18 bp, Artificial sequence
  Primer
ggactcacatgtgagtcc

SEQ ID NO: 10264 - DNA, 18 bp, Artificial sequence
  Primer
cgactcacatgtgagtcg

SEQ ID NO: 10265 - DNA, 18 bp, Artificial sequence
  Primer
  misc_feature (1)..(1): n is a, c, g, or t
  misc_feature (18)..(18): n is a, c, g, or t
ngactctagctagagtcn

SEQ ID NO: 10266 - DNA, 18 bp, Artificial sequence
  Primer
ggactctagctagagtcc

SEQ ID NO: 10267 - DNA, 18 bp, Artificial sequence
  Primer
cgactctagctagagtcg

SEQ ID NO: 10268 - DNA, 18 bp, Artificial sequence
  Primer
  misc_feature (1)..(1): n is a, c, g, or t
  misc_feature (18)..(18): n is a, c, g, or t
ngactcagtactgagtcn

SEQ ID NO: 10269 - DNA, 18 bp, Artificial sequence
  Primer
ggactcagtactgagtcc

SEQ ID NO: 10270 - DNA, 18 bp, Artificial sequence
  Primer
cgactcagtactgagtcg

SEQ ID NO: 10271 - DNA, 18 bp, Artificial sequence
  Primer
  misc_feature (1)..(1): n is a, c, g, or t
  misc_feature (18)..(18): n is a, c, g, or t
ngactcaacgttgagtcn

SEQ ID NO: 10272 - DNA, 18 bp, Artificial sequence
  Primer
ggactcaacgttgagtcc

SEQ ID NO: 10273 - DNA, 18 bp, Artificial sequence
  Primer
tgactcaacgttgagtca

SEQ ID NO: 10274 - DNA, 18 bp, Artificial sequence
  Primer
cgactcaacgttgagtcg

SEQ ID NO: 10275 - DNA, 18 bp, Artificial sequence
  Primer
  misc_feature (1)..(1): n is a, c, g, or t
  misc_feature (18)..(18): n is a, c, g, or t
ngactctgtacagagtcn

SEQ ID NO: 10276 - DNA, 18 bp, Artificial sequence
  Primer
cgactctgtacagagtcg

SEQ ID NO: 10277 - DNA, 18 bp, Artificial sequence
  Primer
  misc_feature (1)..(1): n is a, c, g, or t
  misc_feature (18)..(18): n is a, c, g, or t
ngactcgcatgcgagtcn

SEQ ID NO: 10278 - DNA, 18 bp, Artificial sequence
  Primer
ggactcgcatgcgagtcc

SEQ ID NO: 10279 - DNA, 18 bp, Artificial sequence
  Primer
agactcgcatgcgagtct

SEQ ID NO: 10280 - DNA, 18 bp, Artificial sequence
  Primer
tgactcgcatgcgagtca

SEQ ID NO: 10281 - DNA, 18 bp, Artificial sequence
  Primer
cgactcgcatgcgagtcg

SEQ ID NO: 10282 - DNA, 18 bp, Artificial sequence
  Primer
  misc_feature (1)..(1): n is a, c, g, or t
  misc_feature (18)..(18): n is a, c, g, or t
ngactccagctggagtcn

SEQ ID NO: 10283 - DNA, 18 bp, Artificial sequence
  Primer
ggactccagctggagtcc

SEQ ID NO: 10284 - DNA, 18 bp, Artificial sequence
  Primer
agactccagctggagtct

SEQ ID NO: 10285 - DNA, 18 bp, Artificial sequence
  Primer
tgactccagctggagtca

SEQ ID NO: 10286 - DNA, 18 bp, Artificial sequence
  Primer
cgactccagctggagtcg

SEQ ID NO: 10287 - DNA, 18 bp, Artificial sequence
  Primer
  misc_feature (1)..(1): n is a, c, g, or t
  misc_feature (18)..(18): n is a, c, g, or t
ngactcctcgaggagtcn

SEQ ID NO: 10288 - DNA, 18 bp, Artificial sequence
  Primer
ggactcctcgaggagtcc

SEQ ID NO: 10289 - DNA, 18 bp, Artificial sequence
  Primer
agactcctcgaggagtct

SEQ ID NO: 10290 - DNA, 18 bp, Artificial sequence
  Primer
tgactcctcgaggagtca

SEQ ID NO: 10291 - DNA, 18 bp, Artificial sequence
  Primer
cgactcctcgaggagtcg

SEQ ID NO: 10292 - DNA, 18 bp, Artificial sequence
  Primer
  misc_feature (1)..(1): n is a, c, g, or t
  misc_feature (18)..(18): n is a, c, g, or t
ngactccctagggagtcn

SEQ ID NO: 10293 - DNA, 18 bp, Artificial sequence
  Primer
ggactccctagggagtcc

SEQ ID NO: 10294 - DNA, 18 bp, Artificial sequence
  Primer
agactccctagggagtct

SEQ ID NO: 10295 - DNA, 18 bp, Artificial sequence
  Primer
tgactccctagggagtca

SEQ ID NO: 10296 - DNA, 18 bp, Artificial sequence
  Primer
cgactccctagggagtcg

SEQ ID NO: 10297 - DNA, 18 bp, Artificial sequence
  Primer
  misc_feature (1)..(1): n is a, c, g, or t
  misc_feature (18)..(18): n is a, c, g, or t
ngactcacgcgtgagtcn

SEQ ID NO: 10298 - DNA, 18 bp, Artificial sequence
  Primer
ggactcacgcgtgagtcc

SEQ ID NO: 10299 - DNA, 18 bp, Artificial sequence
  Primer
agactcacgcgtgagtct

SEQ ID NO: 10300 - DNA, 18 bp, Artificial sequence
  Primer
tgactcacgcgtgagtca

SEQ ID NO: 10301 - DNA, 18 bp, Artificial sequence
  Primer
cgactcacgcgtgagtcg

SEQ ID NO: 10302 - DNA, 18 bp, Artificial sequence
  Primer
  misc_feature (1)..(1): n is a, c, g, or t
  misc_feature (18)..(18): n is a, c, g, or t
ngactcagatctgagtcn

SEQ ID NO: 10303 - DNA, 18 bp, Artificial sequence
  Primer
ggactcagatctgagtcc

SEQ ID NO: 10304 - DNA, 18 bp, Artificial sequence
  Primer
cgactcagatctgagtcg

SEQ ID NO: 10305 - DNA, 18 bp, Artificial sequence
  Primer
  misc_feature (1)..(1): n is a, c, g, or t
  misc_feature (18)..(18): n is a, c, g, or t
ngactcttgcaagagtcn

SEQ ID NO: 10306 - DNA, 18 bp, Artificial sequence
  Primer
ggactcttgcaagagtcc

SEQ ID NO: 10307 - DNA, 18 bp, Artificial sequence
  Primer
cgactcttgcaagagtcg

SEQ ID NO: 10308 - DNA, 18 bp, Artificial sequence
  Primer
  misc_feature (1)..(1): n is a, c, g, or t
  misc_feature (18)..(18): n is a, c, g, or t
ngactctacgtagagtcn

SEQ ID NO: 10309 - DNA, 18 bp, Artificial sequence
  Primer
ggactctacgtagagtcc

SEQ ID NO: 10310 - DNA, 18 bp, Artificial sequence
  Primer
cgactctacgtagagtcg

SEQ ID NO: 10311 - DNA, 18 bp, Artificial sequence
  Primer
  misc_feature (1)..(1): n is a, c, g, or t
  misc_feature (18)..(18): n is a, c, g, or t
ngactcgctagcgagtcn

SEQ ID NO: 10312 - DNA, 18 bp, Artificial sequence
  Primer
ggactcgctagcgagtcc

SEQ ID NO: 10313 - DNA, 18 bp, Artificial sequence
  Primer
agactcgctagcgagtct

SEQ ID NO: 10314 - DNA, 18 bp, Artificial sequence
  Primer
tgactcgctagcgagtca

SEQ ID NO: 10315 - DNA, 18 bp, Artificial sequence
  Primer
cgactcgctagcgagtcg

SEQ ID NO: 10316 - DNA, 18 bp, Artificial sequence
  Primer
  misc_feature (1)..(1): n is a, c, g, or t
  misc_feature (18)..(18): n is a, c, g, or t
ngactctcgcgagagtcn

SEQ ID NO: 10317 - DNA, 18 bp, Artificial sequence
  Primer
ggactctcgcgagagtcc

SEQ ID NO: 10318 - DNA, 18 bp, Artificial sequence
  Primer
agactctcgcgagagtct

SEQ ID NO: 10319 - DNA, 18 bp, Artificial sequence
  Primer
tgactctcgcgagagtca

SEQ ID NO: 10320 - DNA, 18 bp, Artificial sequence
  Primer
cgactctcgcgagagtcg

SEQ ID NO: 10321 - DNA, 18 bp, Artificial sequence
  Primer
  misc_feature (1)..(1): n is a, c, g, or t
  misc_feature (18)..(18): n is a, c, g, or t
ngactccacgtggagtcn

SEQ ID NO: 10322 - DNA, 18 bp, Artificial sequence
  Primer
ggactccacgtggagtcc

SEQ ID NO: 10323 - DNA, 18 bp, Artificial sequence
  Primer
agactccacgtggagtct

SEQ ID NO: 10324 - DNA, 18 bp, Artificial sequence
  Primer
tgactccacgtggagtca

SEQ ID NO: 10325 - DNA, 18 bp, Artificial sequence
  Primer
cgactccacgtggagtcg

SEQ ID NO: 10326 - DNA, 18 bp, Artificial sequence
  Primer
  misc_feature (1)..(1): n is a, c, g, or t
  misc_feature (18)..(18): n is a, c, g, or t
ngactctccggagagtcn

SEQ ID NO: 10327 - DNA, 18 bp, Artificial sequence
  Primer
ggactctccggagagtcc

SEQ ID NO: 10328 - DNA, 18 bp, Artificial sequence
  Primer
agactctccggagagtct

SEQ ID NO: 10329 - DNA, 18 bp, Artificial sequence
  Primer
tgactctccggagagtca

SEQ ID NO: 10330 - DNA, 18 bp, Artificial sequence
  Primer
cgactctccggagagtcg

SEQ ID NO: 10331 - DNA, 18 bp, Artificial sequence
  Primer
  misc_feature (1)..(1): n is a, c, g, or t
  misc_feature (18)..(18): n is a, c, g, or t
ngactcgggcccgagtcn

SEQ ID NO: 10332 - DNA, 18 bp, Artificial sequence
  Primer
ggactcgggcccgagtcc

SEQ ID NO: 10333 - DNA, 18 bp, Artificial sequence
  Primer
agactcgggcccgagtct

SEQ ID NO: 10334 - DNA, 18 bp, Artificial sequence
  Primer
tgactcgggcccgagtca

SEQ ID NO: 10335 - DNA, 18 bp, Artificial sequence
  Primer
cgactcgggcccgagtcg

SEQ ID NO: 10336 - DNA, 18 bp, Artificial sequence
  Primer
  misc_feature (1)..(1): n is a, c, g, or t
  misc_feature (18)..(18): n is a, c, g, or t
ngactcgtatacgagtcn

SEQ ID NO: 10337 - DNA, 18 bp, Artificial sequence
  Primer
ggactcgtatacgagtcc

SEQ ID NO: 10338 - DNA, 18 bp, Artificial sequence
  Primer
cgactcgtatacgagtcg

SEQ ID NO: 10339 - DNA, 18 bp, Artificial sequence
  Primer
  misc_feature (1)..(1): n is a, c, g, or t
  misc_feature (18)..(18): n is a, c, g, or t
ngactccttaaggagtcn

SEQ ID NO: 10340 - DNA, 18 bp, Artificial sequence
  Primer
ggactccttaaggagtcc

SEQ ID NO: 10341 - DNA, 18 bp, Artificial sequence
  Primer
cgactccttaaggagtcg

SEQ ID NO: 10342 - DNA, 18 bp, Artificial sequence
  Primer
  misc_feature (1)..(1): n is a, c, g, or t
  misc_feature (18)..(18): n is a, c, g, or t
ngactcatcgatgagtcn

SEQ ID NO: 10343 - DNA, 18 bp, Artificial sequence
  Primer
ggactcatcgatgagtcc

SEQ ID NO: 10344 - DNA, 18 bp, Artificial sequence
  Primer
cgactcatcgatgagtcg

SEQ ID NO: 10345 - DNA, 18 bp, Artificial sequence
  Primer
  misc_feature (1)..(1): n is a, c, g, or t
  misc_feature (18)..(18): n is a, c, g, or t
ngactcggatccgagtcn

SEQ ID NO: 10346 - DNA, 18 bp, Artificial sequence
  Primer
ggactcggatccgagtcc

SEQ ID NO: 10347 - DNA, 18 bp, Artificial sequence
  Primer
agactcggatccgagtct

SEQ ID NO: 10348 - DNA, 18 bp, Artificial sequence
  Primer
tgactcggatccgagtca

SEQ ID NO: 10349 - DNA, 18 bp, Artificial sequence
  Primer
cgactcggatccgagtcg

SEQ ID NO: 10350 - DNA, 18 bp, Artificial sequence
  Primer
  misc_feature (1)..(1): n is a, c, g, or t
  misc_feature (18)..(18): n is a, c, g, or t
ngactcccgcgggagtcn

SEQ ID NO: 10351 - DNA, 18 bp, Artificial sequence
  Primer
ggactcccgcgggagtcc

SEQ ID NO: 10352 - DNA, 18 bp, Artificial sequence
  Primer
agactcccgcgggagtct

SEQ ID NO: 10353 - DNA, 18 bp, Artificial sequence
  Primer
tgactcccgcgggagtca

SEQ ID NO: 10354 - DNA, 18 bp, Artificial sequence
  Primer
cgactcccgcgggagtcg

SEQ ID NO: 10355 - DNA, 18 bp, Artificial sequence
  Primer
  misc_feature (1)..(1): n is a, c, g, or t
  misc_feature (18)..(18): n is a, c, g, or t
ngactctgcgcagagtcn

SEQ ID NO: 10356 - DNA, 18 bp, Artificial sequence
  Primer
ggactctgcgcagagtcc

SEQ ID NO: 10357 - DNA, 18 bp, Artificial sequence
  Primer
agactctgcgcagagtct

SEQ ID NO: 10358 - DNA, 18 bp, Artificial sequence
  Primer
tgactctgcgcagagtca

SEQ ID NO: 10359 - DNA, 18 bp, Artificial sequence
  Primer
cgactctgcgcagagtcg

SEQ ID NO: 10360 - DNA, 18 bp, Artificial sequence
  Primer
  misc_feature (1)..(1): n is a, c, g, or t
  misc_feature (18)..(18): n is a, c, g, or t
ngactccggccggagtcn

SEQ ID NO: 10361 - DNA, 18 bp, Artificial sequence
  Primer
ggactccggccggagtcc

SEQ ID NO: 10362 - DNA, 18 bp, Artificial sequence
  Primer
agactccggccggagtct

SEQ ID NO: 10363 - DNA, 18 bp, Artificial sequence
  Primer
tgactccggccggagtca

SEQ ID NO: 10364 - DNA, 18 bp, Artificial sequence
  Primer
cgactccggccggagtcg

SEQ ID NO: 10365 - DNA, 18 bp, Artificial sequence
  Primer
  misc_feature (1)..(1): n is a, c, g, or t
  misc_feature (18)..(18): n is a, c, g, or t
ngactctggccagagtcn

SEQ ID NO: 10366 - DNA, 18 bp, Artificial sequence
  Primer
ggactctggccagagtcc

SEQ ID NO: 10367 - DNA, 18 bp, Artificial sequence
  Primer
agactctggccagagtct

SEQ ID NO: 10368 - DNA, 18 bp, Artificial sequence
  Primer
tgactctggccagagtca

SEQ ID NO: 10369 - DNA, 18 bp, Artificial sequence
  Primer
cgactctggccagagtcg

SEQ ID NO: 10370 - DNA, 18 bp, Artificial sequence
  Primer
  misc_feature (1)..(1): n is a, c, g, or t
  misc_feature (18)..(18): n is a, c, g, or t
ngactcaagcttgagtcn

SEQ ID NO: 10371 - DNA, 18 bp, Artificial sequence
  Primer
ggactcaagcttgagtcc

SEQ ID NO: 10372 - DNA, 18 bp, Artificial sequence
  Primer
cgactcaagcttgagtcg

SEQ ID NO: 10373 - DNA, 18 bp, Artificial sequence
  Primer
  misc_feature (1)..(1): n is a, c, g, or t
  misc_feature (18)..(18): n is a, c, g, or t
ngactctgatcagagtcn

SEQ ID NO: 10374 - DNA, 18 bp, Artificial sequence
  Primer
ggactctgatcagagtcc

SEQ ID NO: 10375 - DNA, 18 bp, Artificial sequence
  Primer
cgactctgatcagagtcg

SEQ ID NO: 10376 - DNA, 18 bp, Artificial sequence
  Primer
  misc_feature (1)..(1): n is a, c, g, or t
  misc_feature (18)..(18): n is a, c, g, or t
ngactccaattggagtcn

SEQ ID NO: 10377 - DNA, 18 bp, Artificial sequence
  Primer
ggactccaattggagtcc

SEQ ID NO: 10378 - DNA, 18 bp, Artificial sequence
  Primer
cgactccaattggagtcg

SEQ ID NO: 10379 - DNA, 18 bp, Artificial sequence
  Primer
  misc_feature (1)..(1): n is a, c, g, or t
  misc_feature (18)..(18): n is a, c, g, or t
ngactcccatgggagtcn

SEQ ID NO: 10380 - DNA, 18 bp, Artificial sequence
  Primer
ggactcccatgggagtcc

SEQ ID NO: 10381 - DNA, 18 bp, Artificial sequence
  Primer
agactcccatgggagtct

SEQ ID NO: 10382 - DNA, 18 bp, Artificial sequence
  Primer
tgactcccatgggagtca

SEQ ID NO: 10383 - DNA, 18 bp, Artificial sequence
  Primer
cgactcccatgggagtcg

SEQ ID NO: 10384 - DNA, 18 bp, Artificial sequence
  Primer
  misc_feature (1)..(1): n is a, c, g, or t
  misc_feature (18)..(18): n is a, c, g, or t
ngactcaggcctgagtcn

SEQ ID NO: 10385 - DNA, 18 bp, Artificial sequence
  Primer
ggactcaggcctgagtcc

SEQ ID NO: 10386 - DNA, 18 bp, Artificial sequence
  Primer
agactcaggcctgagtct

SEQ ID NO: 10387 - DNA, 18 bp, Artificial sequence
  Primer
tgactcaggcctgagtca

SEQ ID NO: 10388 - DNA, 18 bp, Artificial sequence
  Primer
cgactcaggcctgagtcg

SEQ ID NO: 10389 - DNA, 18 bp, Artificial sequence
  Primer
  misc_feature (1)..(1): n is a, c, g, or t
  misc_feature (18)..(18): n is a, c, g, or t
ngactcgccggcgagtcn

SEQ ID NO: 10390 - DNA, 18 bp, Artificial sequence
  Primer
ggactcgccggcgagtcc

SEQ ID NO: 10391 - DNA, 18 bp, Artificial sequence
  Primer
agactcgccggcgagtct

SEQ ID NO: 10392 - DNA, 18 bp, Artificial sequence
  Primer
tgactcgccggcgagtca

SEQ ID NO: 10393 - DNA, 18 bp, Artificial sequence
  Primer
cgactcgccggcgagtcg

SEQ ID NO: 10394 - DNA, 18 bp, Artificial sequence
  Primer
  misc_feature (1)..(1): n is a, c, g, or t
  misc_feature (18)..(18): n is a, c, g, or t
ngactccgcgcggagtcn

SEQ ID NO: 10395 - DNA, 18 bp, Artificial sequence
  Primer
ggactccgcgcggagtcc

SEQ ID NO: 10396 - DNA, 18 bp, Artificial sequence
  Primer
agactccgcgcggagtct

SEQ ID NO: 10397 - DNA, 18 bp, Artificial sequence
  Primer
tgactccgcgcggagtca

SEQ ID NO: 10398 - DNA, 18 bp, Artificial sequence
  Primer
cgactccgcgcggagtcg

SEQ ID NO: 10399 - DNA, 18 bp, Artificial sequence
  Primer
  misc_feature (1)..(1): n is a, c, g, or t
  misc_feature (18)..(18): n is a, c, g, or t
ngactcgcgcgcgagtcn

SEQ ID NO: 10400 - DNA, 18 bp, Artificial sequence
  Primer
ggactcgcgcgcgagtcc

SEQ ID NO: 10401 - DNA, 18 bp, Artificial sequence
  Primer
agactcgcgcgcgagtct

SEQ ID NO: 10402 - DNA, 18 bp, Artificial sequence
  Primer
tgactcgcgcgcgagtca

SEQ ID NO: 10403 - DNA, 18 bp, Artificial sequence
  Primer
cgactcgcgcgcgagtcg

SEQ ID NO: 10404 - DNA, 18 bp, Artificial sequence
  Primer
  misc_feature (1)..(1): n is a, c, g, or t
  misc_feature (18)..(18): n is a, c, g, or t
ngactctcatgagagtcn

SEQ ID NO: 10405 - DNA, 18 bp, Artificial sequence
  Primer
ggactctcatgagagtcc

SEQ ID NO: 10406 - DNA, 18 bp, Artificial sequence
  Primer
cgactctcatgagagtcg

SEQ ID NO: 10407 - DNA, 18 bp, Artificial sequence
  Primer
  misc_feature (1)..(1): n is a, c, g, or t
  misc_feature (18)..(18): n is a, c, g, or t
ngactcttcgaagagtcn

SEQ ID NO: 10408 - DNA, 18 bp, Artificial sequence
  Primer
ggactcttcgaagagtcc

SEQ ID NO: 10409 - DNA, 18 bp, Artificial sequence
  Primer
cgactcttcgaagagtcg

SEQ ID NO: 10410 - DNA, 22 bp, Artificial sequence
  Primer
  misc_feature (1)..(4): n is a, c, g, or t
  misc_feature (19)..(22): n is a, c, g, or t
nnnngactccgcggagtcnnnn

SEQ ID NO: 10411 - DNA, 22 bp, Artificial sequence
  Primer
ggcggactccgcggagtccgcc

SEQ ID NO: 10412 - DNA, 22 bp, Artificial sequence
  Primer
agcggactccgcggagtccgct

SEQ ID NO: 10413 - DNA, 22 bp, Artificial sequence
  Primer
gacggactccgcggagtccgtc

SEQ ID NO: 10414 - DNA, 22 bp, Artificial sequence
  Primer
ggaggactccgcggagtcctcc

SEQ ID NO: 10415 - DNA, 22 bp, Artificial sequence
  Primer
ggcagactccgcggagtctgcc

SEQ ID NO: 10416 - DNA, 22 bp, Artificial sequence
  Primer
tgcggactccgcggagtccgca

SEQ ID NO: 10417 - DNA, 22 bp, Artificial sequence
  Primer
gtcggactccgcggagtccgac

SEQ ID NO: 10418 - DNA, 22 bp, Artificial sequence
  Primer
ggtggactccgcggagtccacc

SEQ ID NO: 10419 - DNA, 22 bp, Artificial sequence
  Primer
ggctgactccgcggagtcagcc

SEQ ID NO: 10420 - DNA, 22 bp, Artificial sequence
  Primer
gcccgactccgcggagtcgggc

SEQ ID NO: 10421 - DNA, 22 bp, Artificial sequence
  Primer
acccgactccgcggagtcgggt

SEQ ID NO: 10422 - DNA, 22 bp, Artificial sequence
  Primer
gaccgactccgcggagtcggtc

SEQ ID NO: 10423 - DNA, 22 bp, Artificial sequence
  Primer
gcacgactccgcggagtcgtgc

SEQ ID NO: 10424 - DNA, 22 bp, Artificial sequence
  Primer
gccagactccgcggagtctggc

SEQ ID NO: 10425 - DNA, 22 bp, Artificial sequence
  Primer
tcccgactccgcggagtcggga

SEQ ID NO: 10426 - DNA, 22 bp, Artificial sequence
  Primer
gtccgactccgcggagtcggac

SEQ ID NO: 10427 - DNA, 22 bp, Artificial sequence
  Primer
gcctgactccgcggagtcaggc

SEQ ID NO: 10428 - DNA, 22 bp, Artificial sequence
  Primer
gggcgactccgcggagtcgccc

SEQ ID NO: 10429 - DNA, 22 bp, Artificial sequence
  Primer
aggcgactccgcggagtcgcct

SEQ ID NO: 10430 - DNA, 22 bp, Artificial sequence
  Primer
gagcgactccgcggagtcgctc

SEQ ID NO: 10431 - DNA, 22 bp, Artificial sequence
  Primer
ggacgactccgcggagtcgtcc

SEQ ID NO: 10432 - DNA, 22 bp, Artificial sequence
  Primer
gggagactccgcggagtctccc

SEQ ID NO: 10433 - DNA, 22 bp, Artificial sequence
  Primer
tggcgactccgcggagtcgcca

SEQ ID NO: 10434 - DNA, 22 bp, Artificial sequence
  Primer
gtgcgactccgcggagtcgcac

SEQ ID NO: 10435 - DNA, 22 bp, Artificial sequence
  Primer
gggtgactccgcggagtcaccc

SEQ ID NO: 10436 - DNA, 22 bp, Artificial sequence
  Primer
acgggactccgcggagtcccgt

SEQ ID NO: 10437 - DNA, 22 bp, Artificial sequence
  Primer
cagggactccgcggagtccctg

SEQ ID NO: 10438 - DNA, 22 bp, Artificial sequence
  Primer
ccaggactccgcggagtcctgg

SEQ ID NO: 10439 - DNA, 22 bp, Artificial sequence
  Primer
ccgagactccgcggagtctcgg

SEQ ID NO: 10440 - DNA, 22 bp, Artificial sequence
  Primer
tcgggactccgcggagtcccga

SEQ ID NO: 10441 - DNA, 22 bp, Artificial sequence
  Primer
ctgggactccgcggagtcccag

SEQ ID NO: 10442 - DNA, 22 bp, Artificial sequence
  Primer
cctggactccgcggagtccagg

SEQ ID NO: 10443 - DNA, 22 bp, Artificial sequence
  Primer
ccgtgactccgcggagtcacgg

SEQ ID NO: 10444 - DNA, 22 bp, Artificial sequence
  Primer
cggcgactccgcggagtcgccg

SEQ ID NO: 10445 - DNA, 22 bp, Artificial sequence
  Primer
cagcgactccgcggagtcgctg

SEQ ID NO: 10446 - DNA, 22 bp, Artificial sequence
  Primer
cgacgactccgcggagtcgtcg

SEQ ID NO: 10447 - DNA, 22 bp, Artificial sequence
  Primer
cggagactccgcggagtctccg

SEQ ID NO: 10448 - DNA, 22 bp, Artificial sequence
  Primer
ctgcgactccgcggagtcgcag

SEQ ID NO: 10449 - DNA, 22 bp, Artificial sequence
  Primer
cggtgactccgcggagtcaccg

SEQ ID NO: 10450 - DNA, 22 bp, Artificial sequence
  Primer
cacggactccgcggagtccgtg

SEQ ID NO: 10451 - DNA, 22 bp, Artificial sequence
  Primer
cccagactccgcggagtctggg

SEQ ID NO: 10452 - DNA, 22 bp, Artificial sequence
  Primer
ctcggactccgcggagtccgag

SEQ ID NO: 10453 - DNA, 22 bp, Artificial sequence
  Primer
ccctgactccgcggagtcaggg

SEQ ID NO: 10454 - DNA, 22 bp, Artificial sequence
  Primer
ccacgactccgcggagtcgtgg

SEQ ID NO: 10455 - DNA, 22 bp, Artificial sequence
  Primer
agccgactccgcggagtcggct

SEQ ID NO: 10456 - DNA, 22 bp, Artificial sequence
  Primer
tgccgactccgcggagtcggca

SEQ ID NO: 10457 - DNA, 22 bp, Artificial sequence
  Primer
gcgagactccgcggagtctcgc

SEQ ID NO: 10458 - DNA, 22 bp, Artificial sequence
  Primer
gcgtgactccgcggagtcacgc

SEQ ID NO: 10459 - DNA, 22 bp, Artificial sequence
  Primer
gcaggactccgcggagtcctgc

SEQ ID NO: 10460 - DNA, 22 bp, Artificial sequence
  Primer
gctggactccgcggagtccagc

SEQ ID NO: 10461 - DNA, 22 bp, Artificial sequence
  Primer
cgaggactccgcggagtcctcg

SEQ ID NO: 10462 - DNA, 22 bp, Artificial sequence
  Primer
cgtggactccgcggagtccacg

SEQ ID NO: 10463 - DNA, 22 bp, Artificial sequence
  Primer
caccgactccgcggagtcggtg

SEQ ID NO: 10464 - DNA, 22 bp, Artificial sequence
  Primer
ctccgactccgcggagtcggag

SEQ ID NO: 10465 - DNA, 22 bp, Artificial sequence
  Primer
gcgggactccgcggagtcccgc

SEQ ID NO: 10466 - DNA, 22 bp, Artificial sequence
  Primer
gagggactccgcggagtccctc

SEQ ID NO: 10467 - DNA, 22 bp, Artificial sequence
  Primer
gtgggactccgcggagtcccac

SEQ ID NO: 10468 - DNA, 22 bp, Artificial sequence
  Primer
  misc_feature (1)..(4): n is a, c, g, or t
  misc_feature (19)..(22): n is a, c, g, or t
nnnngactctgcagagtcnnnn

SEQ ID NO: 10469 - DNA, 22 bp, Artificial sequence
  Primer
ggcggactctgcagagtccgcc

SEQ ID NO: 10470 - DNA, 22 bp, Artificial sequence
  Primer
agcggactctgcagagtccgct

SEQ ID NO: 10471 - DNA, 22 bp, Artificial sequence
  Primer
gacggactctgcagagtccgtc

SEQ ID NO: 10472 - DNA, 22 bp, Artificial sequence
  Primer
ggaggactctgcagagtcctcc

SEQ ID NO: 10473 - DNA, 22 bp, Artificial sequence
  Primer
ggcagactctgcagagtctgcc

SEQ ID NO: 10474 - DNA, 22 bp, Artificial sequence
  Primer
tgcggactctgcagagtccgca

SEQ ID NO: 10475 - DNA, 22 bp, Artificial sequence
  Primer
gtcggactctgcagagtccgac

SEQ ID NO: 10476 - DNA, 22 bp, Artificial sequence
  Primer
ggtggactctgcagagtccacc

SEQ ID NO: 10477 - DNA, 22 bp, Artificial sequence
  Primer
ggctgactctgcagagtcagcc

SEQ ID NO: 10478 - DNA, 22 bp, Artificial sequence
  Primer
gcccgactctgcagagtcgggc

SEQ ID NO: 10479 - DNA, 22 bp, Artificial sequence
  Primer
acccgactctgcagagtcgggt

SEQ ID NO: 10480 - DNA, 22 bp, Artificial sequence
  Primer
gaccgactctgcagagtcggtc

SEQ ID NO: 10481 - DNA, 22 bp, Artificial sequence
  Primer
gcacgactctgcagagtcgtgc

SEQ ID NO: 10482 - DNA, 22 bp, Artificial sequence
  Primer
gccagactctgcagagtctggc

SEQ ID NO: 10483 - DNA, 22 bp, Artificial sequence
  Primer
tcccgactctgcagagtcggga

SEQ ID NO: 10484 - DNA, 22 bp, Artificial sequence
  Primer
gtccgactctgcagagtcggac

SEQ ID NO: 10485 - DNA, 22 bp, Artificial sequence
  Primer
gcctgactctgcagagtcaggc

SEQ ID NO: 10486 - DNA, 22 bp, Artificial sequence
  Primer
gggcgactctgcagagtcgccc

SEQ ID NO: 10487 - DNA, 22 bp, Artificial sequence
  Primer
aggcgactctgcagagtcgcct

SEQ ID NO: 10488 - DNA, 22 bp, Artificial sequence
  Primer
gagcgactctgcagagtcgctc

SEQ ID NO: 10489 - DNA, 22 bp, Artificial sequence
  Primer
ggacgactctgcagagtcgtcc

SEQ ID NO: 10490 - DNA, 22 bp, Artificial sequence
  Primer
gggagactctgcagagtctccc

SEQ ID NO: 10491 - DNA, 22 bp, Artificial sequence
  Primer
tggcgactctgcagagtcgcca

SEQ ID NO: 10492 - DNA, 22 bp, Artificial sequence
  Primer
gtgcgactctgcagagtcgcac

SEQ ID NO: 10493 - DNA, 22 bp, Artificial sequence
  Primer
gggtgactctgcagagtcaccc

SEQ ID NO: 10494 - DNA, 22 bp, Artificial sequence
  Primer
acgggactctgcagagtcccgt

SEQ ID NO: 10495 - DNA, 22 bp, Artificial sequence
  Primer
cagggactctgcagagtccctg

SEQ ID NO: 10496 - DNA, 22 bp, Artificial sequence
  Primer
ccaggactctgcagagtcctgg

SEQ ID NO: 10497 - DNA, 22 bp, Artificial sequence
  Primer
ccgagactctgcagagtctcgg

SEQ ID NO: 10498 - DNA, 22 bp, Artificial sequence
  Primer
tcgggactctgcagagtcccga

SEQ ID NO: 10499 - DNA, 22 bp, Artificial sequence
  Primer
ctgggactctgcagagtcccag

SEQ ID NO: 10500 - DNA, 22 bp, Artificial sequence
  Primer
cctggactctgcagagtccagg

SEQ ID NO: 10501 - DNA, 22 bp, Artificial sequence
  Primer
ccgtgactctgcagagtcacgg

SEQ ID NO: 10502 - DNA, 22 bp, Artificial sequence
  Primer
cggcgactctgcagagtcgccg

SEQ ID NO: 10503 - DNA, 22 bp, Artificial sequence
  Primer
cagcgactctgcagagtcgctg

SEQ ID NO: 10504 - DNA, 22 bp, Artificial sequence
  Primer
cgacgactctgcagagtcgtcg

SEQ ID NO: 10505 - DNA, 22 bp, Artificial sequence
  Primer
cggagactctgcagagtctccg

SEQ ID NO: 10506 - DNA, 22 bp, Artificial sequence
  Primer
ctgcgactctgcagagtcgcag

SEQ ID NO: 10507 - DNA, 22 bp, Artificial sequence
  Primer
cggtgactctgcagagtcaccg

SEQ ID NO: 10508 - DNA, 22 bp, Artificial sequence
  Primer
cacggactctgcagagtccgtg

SEQ ID NO: 10509 - DNA, 22 bp, Artificial sequence
  Primer
cccagactctgcagagtctggg

SEQ ID NO: 10510 - DNA, 22 bp, Artificial sequence
  Primer
ctcggactctgcagagtccgag

SEQ ID NO: 10511 - DNA, 22 bp, Artificial sequence
  Primer
ccctgactctgcagagtcaggg

SEQ ID NO: 10512 - DNA, 22 bp, Artificial sequence
  Primer
ccacgactctgcagagtcgtgg

SEQ ID NO: 10513 - DNA, 22 bp, Artificial sequence
  Primer
agccgactctgcagagtcggct

SEQ ID NO: 10514 - DNA, 22 bp, Artificial sequence
  Primer
tgccgactctgcagagtcggca

SEQ ID NO: 10515 - DNA, 22 bp, Artificial sequence
  Primer
gcgagactctgcagagtctcgc

SEQ ID NO: 10516 - DNA, 22 bp, Artificial sequence
  Primer
gcgtgactctgcagagtcacgc

SEQ ID NO: 10517 - DNA, 22 bp, Artificial sequence
  Primer
gcaggactctgcagagtcctgc

SEQ ID NO: 10518 - DNA, 22 bp, Artificial sequence
  Primer
gctggactctgcagagtccagc

SEQ ID NO: 10519 - DNA, 22 bp, Artificial sequence
  Primer
cgaggactctgcagagtcctcg

SEQ ID NO: 10520 - DNA, 22 bp, Artificial sequence
  Primer
cgtggactctgcagagtccacg

SEQ ID NO: 10521 - DNA, 22 bp, Artificial sequence
  Primer
caccgactctgcagagtcggtg

SEQ ID NO: 10522 - DNA, 22 bp, Artificial sequence
  Primer
ctccgactctgcagagtcggag

SEQ ID NO: 10523 - DNA, 22 bp, Artificial sequence
  Primer
gcgggactctgcagagtcccgc

SEQ ID NO: 10524 - DNA, 22 bp, Artificial sequence
  Primer
gagggactctgcagagtccctc

SEQ ID NO: 10525 - DNA, 22 bp, Artificial sequence
  Primer
gtgggactctgcagagtcccac

SEQ ID NO: 10526 - DNA, 22 bp, Artificial sequence
  Primer
  misc_feature (1)..(4): n is a, c, g, or t
  misc_feature (19)..(22): n is a, c, g, or t
nnnngactcgcgcgagtcnnnn

SEQ ID NO: 10527 - DNA, 22 bp, Artificial sequence
  Primer
ggcggactcgcgcgagtccgcc

SEQ ID NO: 10528 - DNA, 22 bp, Artificial sequence
  Primer
agcggactcgcgcgagtccgct

SEQ ID NO: 10529 - DNA, 22 bp, Artificial sequence
  Primer
gacggactcgcgcgagtccgtc

SEQ ID NO: 10530 - DNA, 22 bp, Artificial sequence
  Primer
ggaggactcgcgcgagtcctcc

SEQ ID NO: 10531 - DNA, 22 bp, Artificial sequence
  Primer
ggcagactcgcgcgagtctgcc

SEQ ID NO: 10532 - DNA, 22 bp, Artificial sequence
  Primer
tgcggactcgcgcgagtccgca

SEQ ID NO: 10533 - DNA, 22 bp, Artificial sequence
  Primer
gtcggactcgcgcgagtccgac

SEQ ID NO: 10534 - DNA, 22 bp, Artificial sequence
  Primer
ggtggactcgcgcgagtccacc

SEQ ID NO: 10535 - DNA, 22 bp, Artificial sequence
  Primer
ggctgactcgcgcgagtcagcc

SEQ ID NO: 10536 - DNA, 22 bp, Artificial sequence
  Primer
gcccgactcgcgcgagtcgggc

SEQ ID NO: 10537 - DNA, 22 bp, Artificial sequence
  Primer
acccgactcgcgcgagtcgggt

SEQ ID NO: 10538 - DNA, 22 bp, Artificial sequence
  Primer
gaccgactcgcgcgagtcggtc

SEQ ID NO: 10539 - DNA, 22 bp, Artificial sequence
  Primer
gcacgactcgcgcgagtcgtgc

SEQ ID NO: 10540 - DNA, 22 bp, Artificial sequence
  Primer
gccagactcgcgcgagtctggc

SEQ ID NO: 10541 - DNA, 22 bp, Artificial sequence
  Primer
tcccgactcgcgcgagtcggga

SEQ ID NO: 10542 - DNA, 22 bp, Artificial sequence
  Primer
gtccgactcgcgcgagtcggac

SEQ ID NO: 10543 - DNA, 22 bp, Artificial sequence
  Primer
gcctgactcgcgcgagtcaggc

SEQ ID NO: 10544 - DNA, 22 bp, Artificial sequence
  Primer
gggcgactcgcgcgagtcgccc

SEQ ID NO: 10545 - DNA, 22 bp, Artificial sequence
  Primer
aggcgactcgcgcgagtcgcct

SEQ ID NO: 10546 - DNA, 22 bp, Artificial sequence
  Primer
gagcgactcgcgcgagtcgctc

SEQ ID NO: 10547 - DNA, 22 bp, Artificial sequence
  Primer
ggacgactcgcgcgagtcgtcc

SEQ ID NO: 10548 - DNA, 22 bp, Artificial sequence
  Primer
gggagactcgcgcgagtctccc

SEQ ID NO: 10549 - DNA, 22 bp, Artificial sequence
  Primer
tggcgactcgcgcgagtcgcca

SEQ ID NO: 10550 - DNA, 22 bp, Artificial sequence
  Primer
gtgcgactcgcgcgagtcgcac

SEQ ID NO: 10551 - DNA, 22 bp, Artificial sequence
  Primer
gggtgactcgcgcgagtcaccc

SEQ ID NO: 10552 - DNA, 22 bp, Artificial sequence
  Primer
acgggactcgcgcgagtcccgt

SEQ ID NO: 10553 - DNA, 22 bp, Artificial sequence
  Primer
cagggactcgcgcgagtccctg

SEQ ID NO: 10554 - DNA, 22 bp, Artificial sequence
  Primer
ccaggactcgcgcgagtcctgg

SEQ ID NO: 10555 - DNA, 22 bp, Artificial sequence
  Primer
ccgagactcgcgcgagtctcgg

SEQ ID NO: 10556 - DNA, 22 bp, Artificial sequence
  Primer
tcgggactcgcgcgagtcccga

SEQ ID NO: 10557 - DNA, 22 bp, Artificial sequence
  Primer
ctgggactcgcgcgagtcccag

SEQ ID NO: 10558 - DNA, 22 bp, Artificial sequence
  Primer
cctggactcgcgcgagtccagg

SEQ ID NO: 10559 - DNA, 22 bp, Artificial sequence
  Primer
ccgtgactcgcgcgagtcacgg

SEQ ID NO: 10560 - DNA, 22 bp, Artificial sequence
  Primer
cggcgactcgcgcgagtcgccg

SEQ ID NO: 10561 - DNA, 22 bp, Artificial sequence
  Primer
cagcgactcgcgcgagtcgctg

SEQ ID NO: 10562 - DNA, 22 bp, Artificial sequence
  Primer
cgacgactcgcgcgagtcgtcg

SEQ ID NO: 10563 - DNA, 22 bp, Artificial sequence
  Primer
cggagactcgcgcgagtctccg

SEQ ID NO: 10564 - DNA, 22 bp, Artificial sequence
  Primer
ctgcgactcgcgcgagtcgcag

SEQ ID NO: 10565 - DNA, 22 bp, Artificial sequence
  Primer
cggtgactcgcgcgagtcaccg

SEQ ID NO: 10566 - DNA, 22 bp, Artificial sequence
  Primer
cacggactcgcgcgagtccgtg

SEQ ID NO: 10567 - DNA, 22 bp, Artificial sequence
  Primer
cccagactcgcgcgagtctggg

SEQ ID NO: 10568 - DNA, 22 bp, Artificial sequence
  Primer
ctcggactcgcgcgagtccgag

SEQ ID NO: 10569 - DNA, 22 bp, Artificial sequence
  Primer
ccctgactcgcgcgagtcaggg

SEQ ID NO: 10570 - DNA, 22 bp, Artificial sequence
  Primer
ccacgactcgcgcgagtcgtgg

SEQ ID NO: 10571 - DNA, 22 bp, Artificial sequence
  Primer
agccgactcgcgcgagtcggct

SEQ ID NO: 10572 - DNA, 22 bp, Artificial sequence
  Primer
tgccgactcgcgcgagtcggca

SEQ ID NO: 10573 - DNA, 22 bp, Artificial sequence
  Primer
gcgagactcgcgcgagtctcgc

SEQ ID NO: 10574 - DNA, 22 bp, Artificial sequence
  Primer
gcgtgactcgcgcgagtcacgc

SEQ ID NO: 10575 - DNA, 22 bp, Artificial sequence
  Primer
gcaggactcgcgcgagtcctgc

SEQ ID NO: 10576 - DNA, 22 bp, Artificial sequence
  Primer
gctggactcgcgcgagtccagc

SEQ ID NO: 10577 - DNA, 22 bp, Artificial sequence
  Primer
cgaggactcgcgcgagtcctcg

SEQ ID NO: 10578 - DNA, 22 bp, Artificial sequence
  Primer
cgtggactcgcgcgagtccacg

SEQ ID NO: 10579 - DNA, 22 bp, Artificial sequence
  Primer
caccgactcgcgcgagtcggtg

SEQ ID NO: 10580 - DNA, 22 bp, Artificial sequence
  Primer
ctccgactcgcgcgagtcggag

SEQ ID NO: 10581 - DNA, 22 bp, Artificial sequence
  Primer
gcgggactcgcgcgagtcccgc

SEQ ID NO: 10582 - DNA, 22 bp, Artificial sequence
  Primer
gagggactcgcgcgagtccctc

SEQ ID NO: 10583 - DNA, 22 bp, Artificial sequence
  Primer
gtgggactcgcgcgagtcccac

SEQ ID NO: 10584 - DNA, 22 bp, Artificial sequence
  Primer
  misc_feature (1)..(4): n is a, c, g, or t
  misc_feature (19)..(22): n is a, c, g, or t
nnnngactcacgtgagtcnnnn

SEQ ID NO: 10585 - DNA, 22 bp, Artificial sequence
  Primer
ggcggactcacgtgagtccgcc

SEQ ID NO: 10586 - DNA, 22 bp, Artificial sequence
  Primer
agcggactcacgtgagtccgct

SEQ ID NO: 10587 - DNA, 22 bp, Artificial sequence
  Primer
gacggactcacgtgagtccgtc

SEQ ID NO: 10588 - DNA, 22 bp, Artificial sequence
  Primer
ggaggactcacgtgagtcctcc

SEQ ID NO: 10589 - DNA, 22 bp, Artificial sequence
  Primer
ggcagactcacgtgagtctgcc

SEQ ID NO: 10590 - DNA, 22 bp, Artificial sequence
  Primer
tgcggactcacgtgagtccgca

SEQ ID NO: 10591 - DNA, 22 bp, Artificial sequence
  Primer
gtcggactcacgtgagtccgac

SEQ ID NO: 10592 - DNA, 22 bp, Artificial sequence
  Primer
ggtggactcacgtgagtccacc

SEQ ID NO: 10593 - DNA, 22 bp, Artificial sequence
  Primer
ggctgactcacgtgagtcagcc

SEQ ID NO: 10594 - DNA, 22 bp, Artificial sequence
  Primer
gcccgactcacgtgagtcgggc

SEQ ID NO: 10595 - DNA, 22 bp, Artificial sequence
  Primer
acccgactcacgtgagtcgggt

SEQ ID NO: 10596 - DNA, 22 bp, Artificial sequence
  Primer
gaccgactcacgtgagtcggtc

SEQ ID NO: 10597 - DNA, 22 bp, Artificial sequence
  Primer
gcacgactcacgtgagtcgtgc

SEQ ID NO: 10598 - DNA, 22 bp, Artificial sequence
  Primer
gccagactcacgtgagtctggc

SEQ ID NO: 10599 - DNA, 22 bp, Artificial sequence
  Primer
tcccgactcacgtgagtcggga

SEQ ID NO: 10600 - DNA, 22 bp, Artificial sequence
  Primer
gtccgactcacgtgagtcggac

SEQ ID NO: 10601 - DNA, 22 bp, Artificial sequence
  Primer
gcctgactcacgtgagtcaggc

SEQ ID NO: 10602 - DNA, 22 bp, Artificial sequence
  Primer
gggcgactcacgtgagtcgccc

SEQ ID NO: 10603 - DNA, 22 bp, Artificial sequence
  Primer
aggcgactcacgtgagtcgcct

SEQ ID NO: 10604 - DNA, 22 bp, Artificial sequence
  Primer
gagcgactcacgtgagtcgctc

SEQ ID NO: 10605 - DNA, 22 bp, Artificial sequence
  Primer
ggacgactcacgtgagtcgtcc

SEQ ID NO: 10606 - DNA, 22 bp, Artificial sequence
  Primer
gggagactcacgtgagtctccc

SEQ ID NO: 10607 - DNA, 22 bp, Artificial sequence
  Primer
tggcgactcacgtgagtcgcca

SEQ ID NO: 10608 - DNA, 22 bp, Artificial sequence
  Primer
gtgcgactcacgtgagtcgcac

SEQ ID NO: 10609 - DNA, 22 bp, Artificial sequence
  Primer
gggtgactcacgtgagtcaccc

SEQ ID NO: 10610 - DNA, 22 bp, Artificial sequence
  Primer
acgggactcacgtgagtcccgt

SEQ ID NO: 10611 - DNA, 22 bp, Artificial sequence
  Primer
cagggactcacgtgagtccctg

SEQ ID NO: 10612 - DNA, 22 bp, Artificial sequence
  Primer
ccaggactcacgtgagtcctgg

SEQ ID NO: 10613 - DNA, 22 bp, Artificial sequence
  Primer
ccgagactcacgtgagtctcgg

SEQ ID NO: 10614 - DNA, 22 bp, Artificial sequence
  Primer
tcgggactcacgtgagtcccga

SEQ ID NO: 10615 - DNA, 22 bp, Artificial sequence
  Primer
ctgggactcacgtgagtcccag

SEQ ID NO: 10616 - DNA, 22 bp, Artificial sequence
  Primer
cctggactcacgtgagtccagg

SEQ ID NO: 10617 - DNA, 22 bp, Artificial sequence
  Primer
ccgtgactcacgtgagtcacgg

SEQ ID NO: 10618 - DNA, 22 bp, Artificial sequence
  Primer
cggcgactcacgtgagtcgccg

SEQ ID NO: 10619 - DNA, 22 bp, Artificial sequence
  Primer
cagcgactcacgtgagtcgctg

SEQ ID NO: 10620 - DNA, 22 bp, Artificial sequence
  Primer
cgacgactcacgtgagtcgtcg

SEQ ID NO: 10621 - DNA, 22 bp, Artificial sequence
  Primer
cggagactcacgtgagtctccg

SEQ ID NO: 10622 - DNA, 22 bp, Artificial sequence
  Primer
ctgcgactcacgtgagtcgcag

SEQ ID NO: 10623 - DNA, 22 bp, Artificial sequence
  Primer
cggtgactcacgtgagtcaccg

SEQ ID NO: 10624 - DNA, 22 bp, Artificial sequence
  Primer
cacggactcacgtgagtccgtg

SEQ ID NO: 10625 - DNA, 22 bp, Artificial sequence
  Primer
cccagactcacgtgagtctggg

SEQ ID NO: 10626 - DNA, 22 bp, Artificial sequence
  Primer
ctcggactcacgtgagtccgag

SEQ ID NO: 10627 - DNA, 22 bp, Artificial sequence
  Primer
ccctgactcacgtgagtcaggg

SEQ ID NO: 10628 - DNA, 22 bp, Artificial sequence
  Primer
ccacgactcacgtgagtcgtgg

SEQ ID NO: 10629 - DNA, 22 bp, Artificial sequence
  Primer
agccgactcacgtgagtcggct

SEQ ID NO: 10630 - DNA, 22 bp, Artificial sequence
  Primer
tgccgactcacgtgagtcggca

SEQ ID NO: 10631 - DNA, 22 bp, Artificial sequence
  Primer
gcgagactcacgtgagtctcgc

SEQ ID NO: 10632 - DNA, 22 bp, Artificial sequence
  Primer
gcgtgactcacgtgagtcacgc

SEQ ID NO: 10633 - DNA, 22 bp, Artificial sequence
  Primer
gcaggactcacgtgagtcctgc

SEQ ID NO: 10634 - DNA, 22 bp, Artificial sequence
  Primer
gctggactcacgtgagtccagc

SEQ ID NO: 10635 - DNA, 22 bp, Artificial sequence
  Primer
cgaggactcacgtgagtcctcg

SEQ ID NO: 10636 - DNA, 22 bp, Artificial sequence
  Primer
cgtggactcacgtgagtccacg

SEQ ID NO: 10637 - DNA, 22 bp, Artificial sequence
  Primer
caccgactcacgtgagtcggtg

SEQ ID NO: 10638 - DNA, 22 bp, Artificial sequence
  Primer
ctccgactcacgtgagtcggag

SEQ ID NO: 10639 - DNA, 22 bp, Artificial sequence
  Primer
gcgggactcacgtgagtcccgc

SEQ ID NO: 10640 - DNA, 22 bp, Artificial sequence
  Primer
gagggactcacgtgagtccctc

SEQ ID NO: 10641 - DNA, 22 bp, Artificial sequence
  Primer
gtgggactcacgtgagtcccac

SEQ ID NO: 10642 - DNA, 22 bp, Artificial sequence
  Primer
  misc_feature (1)..(4): n is a, c, g, or t
  misc_feature (19)..(22): n is a, c, g, or t
nnnngactcggccgagtcnnnn

SEQ ID NO: 10643 - DNA, 22 bp, Artificial sequence
  Primer
ggcggactcggccgagtccgcc

SEQ ID NO: 10644 - DNA, 22 bp, Artificial sequence
  Primer
agcggactcggccgagtccgct

SEQ ID NO: 10645 - DNA, 22 bp, Artificial sequence
  Primer
gacggactcggccgagtccgtc

SEQ ID NO: 10646 - DNA, 22 bp, Artificial sequence
  Primer
ggaggactcggccgagtcctcc

SEQ ID NO: 10647 - DNA, 22 bp, Artificial sequence
  Primer
ggcagactcggccgagtctgcc

SEQ ID NO: 10648 - DNA, 22 bp, Artificial sequence
  Primer
tgcggactcggccgagtccgca

SEQ ID NO: 10649 - DNA, 22 bp, Artificial sequence
  Primer
gtcggactcggccgagtccgac

SEQ ID NO: 10650 - DNA, 22 bp, Artificial sequence
  Primer
ggtggactcggccgagtccacc

SEQ ID NO: 10651 - DNA, 22 bp, Artificial sequence
  Primer
ggctgactcggccgagtcagcc

SEQ ID NO: 10652 - DNA, 22 bp, Artificial sequence
  Primer
gcccgactcggccgagtcgggc

SEQ ID NO: 10653 - DNA, 22 bp, Artificial sequence
  Primer
acccgactcggccgagtcgggt

SEQ ID NO: 10654 - DNA, 22 bp, Artificial sequence
  Primer
gaccgactcggccgagtcggtc

SEQ ID NO: 10655 - DNA, 22 bp, Artificial sequence
  Primer
gcacgactcggccgagtcgtgc

SEQ ID NO: 10656 - DNA, 22 bp, Artificial sequence
  Primer
gccagactcggccgagtctggc

SEQ ID NO: 10657 - DNA, 22 bp, Artificial sequence
  Primer
tcccgactcggccgagtcggga

SEQ ID NO: 10658 - DNA, 22 bp, Artificial sequence
  Primer
gtccgactcggccgagtcggac

SEQ ID NO: 10659 - DNA, 22 bp, Artificial sequence
  Primer
gcctgactcggccgagtcaggc

SEQ ID NO: 10660 - DNA, 22 bp, Artificial sequence
  Primer
gggcgactcggccgagtcgccc

SEQ ID NO: 10661 - DNA, 22 bp, Artificial sequence
  Primer
aggcgactcggccgagtcgcct

SEQ ID NO: 10662 - DNA, 22 bp, Artificial sequence
  Primer
gagcgactcggccgagtcgctc

SEQ ID NO: 10663 - DNA, 22 bp, Artificial sequence
  Primer
ggacgactcggccgagtcgtcc

SEQ ID NO: 10664 - DNA, 22 bp, Artificial sequence
  Primer
gggagactcggccgagtctccc

SEQ ID NO: 10665 - DNA, 22 bp, Artificial sequence
  Primer
tggcgactcggccgagtcgcca

SEQ ID NO: 10666 - DNA, 22 bp, Artificial sequence
  Primer
gtgcgactcggccgagtcgcac

SEQ ID NO: 10667 - DNA, 22 bp, Artificial sequence
  Primer
gggtgactcggccgagtcaccc

SEQ ID NO: 10668 - DNA, 22 bp, Artificial sequence
  Primer
acgggactcggccgagtcccgt

SEQ ID NO: 10669 - DNA, 22 bp, Artificial sequence
  Primer
cagggactcggccgagtccctg

SEQ ID NO: 10670 - DNA, 22 bp, Artificial sequence
  Primer
ccaggactcggccgagtcctgg

SEQ ID NO: 10671 - DNA, 22 bp, Artificial sequence
  Primer
ccgagactcggccgagtctcgg

SEQ ID NO: 10672 - DNA, 22 bp, Artificial sequence
  Primer
tcgggactcggccgagtcccga

SEQ ID NO: 10673 - DNA, 22 bp, Artificial sequence
  Primer
ctgggactcggccgagtcccag

SEQ ID NO: 10674 - DNA, 22 bp, Artificial sequence
  Primer
cctggactcggccgagtccagg

SEQ ID NO: 10675 - DNA, 22 bp, Artificial sequence
  Primer
ccgtgactcggccgagtcacgg

SEQ ID NO: 10676 - DNA, 22 bp, Artificial sequence
  Primer
cggcgactcggccgagtcgccg

SEQ ID NO: 10677 - DNA, 22 bp, Artificial sequence
  Primer
cagcgactcggccgagtcgctg

SEQ ID NO: 10678 - DNA, 22 bp, Artificial sequence
  Primer
cgacgactcggccgagtcgtcg

SEQ ID NO: 10679 - DNA, 22 bp, Artificial sequence
  Primer
cggagactcggccgagtctccg

SEQ ID NO: 10680 - DNA, 22 bp, Artificial sequence
  Primer
ctgcgactcggccgagtcgcag

SEQ ID NO: 10681 - DNA, 22 bp, Artificial sequence
  Primer
cggtgactcggccgagtcaccg

SEQ ID NO: 10682 - DNA, 22 bp, Artificial sequence
  Primer
cacggactcggccgagtccgtg

SEQ ID NO: 10683 - DNA, 22 bp, Artificial sequence
  Primer
cccagactcggccgagtctggg

SEQ ID NO: 10684 - DNA, 22 bp, Artificial sequence
  Primer
ctcggactcggccgagtccgag

SEQ ID NO: 10685 - DNA, 22 bp, Artificial sequence
  Primer
ccctgactcggccgagtcaggg

SEQ ID NO: 10686 - DNA, 22 bp, Artificial sequence
  Primer
ccacgactcggccgagtcgtgg

SEQ ID NO: 10687 - DNA, 22 bp, Artificial sequence
  Primer
agccgactcggccgagtcggct

SEQ ID NO: 10688 - DNA, 22 bp, Artificial sequence
  Primer
tgccgactcggccgagtcggca

SEQ ID NO: 10689 - DNA, 22 bp, Artificial sequence
  Primer
gcgagactcggccgagtctcgc

SEQ ID NO: 10690 - DNA, 22 bp, Artificial sequence
  Primer
gcgtgactcggccgagtcacgc

SEQ ID NO: 10691 - DNA, 22 bp, Artificial sequence
  Primer
gcaggactcggccgagtcctgc

SEQ ID NO: 10692 - DNA, 22 bp, Artificial sequence
  Primer
gctggactcggccgagtccagc

SEQ ID NO: 10693 - DNA, 22 bp, Artificial sequence
  Primer
cgaggactcggccgagtcctcg

SEQ ID NO: 10694 - DNA, 22 bp, Artificial sequence
  Primer
cgtggactcggccgagtccacg

SEQ ID NO: 10695 - DNA, 22 bp, Artificial sequence
  Primer
caccgactcggccgagtcggtg

SEQ ID NO: 10696 - DNA, 22 bp, Artificial sequence
  Primer
ctccgactcggccgagtcggag

SEQ ID NO: 10697 - DNA, 22 bp, Artificial sequence
  Primer
gcgggactcggccgagtcccgc

SEQ ID NO: 10698 - DNA, 22 bp, Artificial sequence
  Primer
gagggactcggccgagtccctc

SEQ ID NO: 10699 - DNA, 22 bp, Artificial sequence
  Primer
gtgggactcggccgagtcccac

SEQ ID NO: 10700 - DNA, 22 bp, Artificial sequence
  Primer
  misc_feature (1)..(4): n is a, c, g, or t
  misc_feature (19)..(22): n is a, c, g, or t
nnnngactcccgggagtcnnnn

SEQ ID NO: 10701 - DNA, 22 bp, Artificial sequence
  Primer
ggcggactcccgggagtccgcc

SEQ ID NO: 10702 - DNA, 22 bp, Artificial sequence
  Primer
agcggactcccgggagtccgct

SEQ ID NO: 10703 - DNA, 22 bp, Artificial sequence
  Primer
gacggactcccgggagtccgtc

SEQ ID NO: 10704 - DNA, 22 bp, Artificial sequence
  Primer
ggaggactcccgggagtcctcc

SEQ ID NO: 10705 - DNA, 22 bp, Artificial sequence
  Primer
ggcagactcccgggagtctgcc

SEQ ID NO: 10706 - DNA, 22 bp, Artificial sequence
  Primer
tgcggactcccgggagtccgca

SEQ ID NO: 10707 - DNA, 22 bp, Artificial sequence
  Primer
gtcggactcccgggagtccgac

SEQ ID NO: 10708 - DNA, 22 bp, Artificial sequence
  Primer
ggtggactcccgggagtccacc

SEQ ID NO: 10709 - DNA, 22 bp, Artificial sequence
  Primer
ggctgactcccgggagtcagcc

SEQ ID NO: 10710 - DNA, 22 bp, Artificial sequence
  Primer
gcccgactcccgggagtcgggc

SEQ ID NO: 10711 - DNA, 22 bp, Artificial sequence
  Primer
acccgactcccgggagtcgggt

SEQ ID NO: 10712 - DNA, 22 bp, Artificial sequence
  Primer
gaccgactcccgggagtcggtc

SEQ ID NO: 10713 - DNA, 22 bp, Artificial sequence
  Primer
gcacgactcccgggagtcgtgc

SEQ ID NO: 10714 - DNA, 22 bp, Artificial sequence
  Primer
gccagactcccgggagtctggc

SEQ ID NO: 10715 - DNA, 22 bp, Artificial sequence
  Primer
tcccgactcccgggagtcggga

SEQ ID NO: 10716 - DNA, 22 bp, Artificial sequence
  Primer
gtccgactcccgggagtcggac

SEQ ID NO: 10717 - DNA, 22 bp, Artificial sequence
  Primer
gcctgactcccgggagtcaggc

SEQ ID NO: 10718 - DNA, 22 bp, Artificial sequence
  Primer
gggcgactcccgggagtcgccc

SEQ ID NO: 10719 - DNA, 22 bp, Artificial sequence
  Primer
aggcgactcccgggagtcgcct

SEQ ID NO: 10720 - DNA, 22 bp, Artificial sequence
  Primer
gagcgactcccgggagtcgctc

SEQ ID NO: 10721 - DNA, 22 bp, Artificial sequence
  Primer
ggacgactcccgggagtcgtcc

SEQ ID NO: 10722 - DNA, 22 bp, Artificial sequence
  Primer
gggagactcccgggagtctccc

SEQ ID NO: 10723 - DNA, 22 bp, Artificial sequence
  Primer
tggcgactcccgggagtcgcca

SEQ ID NO: 10724 - DNA, 22 bp, Artificial sequence
  Primer
gtgcgactcccgggagtcgcac

SEQ ID NO: 10725 - DNA, 22 bp, Artificial sequence
  Primer
gggtgactcccgggagtcaccc

SEQ ID NO: 10726 - DNA, 22 bp, Artificial sequence
  Primer
acgggactcccgggagtcccgt

SEQ ID NO: 10727 - DNA, 22 bp, Artificial sequence
  Primer
cagggactcccgggagtccctg

SEQ ID NO: 10728 - DNA, 22 bp, Artificial sequence
  Primer
ccaggactcccgggagtcctgg

SEQ ID NO: 10729 - DNA, 22 bp, Artificial sequence
  Primer
ccgagactcccgggagtctcgg

SEQ ID NO: 10730 - DNA, 22 bp, Artificial sequence
  Primer
tcgggactcccgggagtcccga

SEQ ID NO: 10731 - DNA, 22 bp, Artificial sequence
  Primer
ctgggactcccgggagtcccag

SEQ ID NO: 10732 - DNA, 22 bp, Artificial sequence
  Primer
cctggactcccgggagtccagg

SEQ ID NO: 10733 - DNA, 22 bp, Artificial sequence
  Primer
ccgtgactcccgggagtcacgg

SEQ ID NO: 10734 - DNA, 22 bp, Artificial sequence
  Primer
cggcgactcccgggagtcgccg

SEQ ID NO: 10735 - DNA, 22 bp, Artificial sequence
  Primer
cagcgactcccgggagtcgctg

SEQ ID NO: 10736 - DNA, 22 bp, Artificial sequence
  Primer
cgacgactcccgggagtcgtcg

SEQ ID NO: 10737 - DNA, 22 bp, Artificial sequence
  Primer
cggagactcccgggagtctccg

SEQ ID NO: 10738 - DNA, 22 bp, Artificial sequence
  Primer
ctgcgactcccgggagtcgcag

SEQ ID NO: 10739 - DNA, 22 bp, Artificial sequence
  Primer
cggtgactcccgggagtcaccg

SEQ ID NO: 10740 - DNA, 22 bp, Artificial sequence
  Primer
cacggactcccgggagtccgtg

SEQ ID NO: 10741 - DNA, 22 bp, Artificial sequence
  Primer
cccagactcccgggagtctggg

SEQ ID NO: 10742 - DNA, 22 bp, Artificial sequence
  Primer
ctcggactcccgggagtccgag

SEQ ID NO: 10743 - DNA, 22 bp, Artificial sequence
  Primer
ccctgactcccgggagtcaggg

SEQ ID NO: 10744 - DNA, 22 bp, Artificial sequence
  Primer
ccacgactcccgggagtcgtgg

SEQ ID NO: 10745 - DNA, 22 bp, Artificial sequence
  Primer
agccgactcccgggagtcggct

SEQ ID NO: 10746 - DNA, 22 bp, Artificial sequence
  Primer
tgccgactcccgggagtcggca

SEQ ID NO: 10747 - DNA, 22 bp, Artificial sequence
  Primer
gcgagactcccgggagtctcgc

SEQ ID NO: 10748 - DNA, 22 bp, Artificial sequence
  Primer
gcgtgactcccgggagtcacgc

SEQ ID NO: 10749 - DNA, 22 bp, Artificial sequence
  Primer
gcaggactcccgggagtcctgc

SEQ ID NO: 10750 - DNA, 22 bp, Artificial sequence
  Primer
gctggactcccgggagtccagc

SEQ ID NO: 10751 - DNA, 22 bp, Artificial sequence
  Primer
cgaggactcccgggagtcctcg

SEQ ID NO: 10752 - DNA, 22 bp, Artificial sequence
  Primer
cgtggactcccgggagtccacg

SEQ ID NO: 10753 - DNA, 22 bp, Artificial sequence
  Primer
caccgactcccgggagtcggtg

SEQ ID NO: 10754 - DNA, 22 bp, Artificial sequence
  Primer
ctccgactcccgggagtcggag

SEQ ID NO: 10755 - DNA, 22 bp, Artificial sequence
  Primer
gcgggactcccgggagtcccgc

SEQ ID NO: 10756 - DNA, 22 bp, Artificial sequence
  Primer
gagggactcccgggagtccctc

SEQ ID NO: 10757 - DNA, 22 bp, Artificial sequence
  Primer
gtgggactcccgggagtcccac

SEQ ID NO: 10758 - DNA, 22 bp, Artificial sequence
  Primer
  misc_feature (1)..(4): n is a, c, g, or t
  misc_feature (19)..(22): n is a, c, g, or t
nnnngactcgtacgagtcnnnn

SEQ ID NO: 10759 - DNA, 22 bp, Artificial sequence
  Primer
ggcggactcgtacgagtccgcc

SEQ ID NO: 10760 - DNA, 22 bp, Artificial sequence
  Primer
agcggactcgtacgagtccgct

SEQ ID NO: 10761 - DNA, 22 bp, Artificial sequence
  Primer
gacggactcgtacgagtccgtc

SEQ ID NO: 10762 - DNA, 22 bp, Artificial sequence
  Primer
ggaggactcgtacgagtcctcc

SEQ ID NO: 10763 - DNA, 22 bp, Artificial sequence
  Primer
ggcagactcgtacgagtctgcc

SEQ ID NO: 10764 - DNA, 22 bp, Artificial sequence
  Primer
tgcggactcgtacgagtccgca

SEQ ID NO: 10765 - DNA, 22 bp, Artificial sequence
  Primer
gtcggactcgtacgagtccgac

SEQ ID NO: 10766 - DNA, 22 bp, Artificial sequence
  Primer
ggtggactcgtacgagtccacc

SEQ ID NO: 10767 - DNA, 22 bp, Artificial sequence
  Primer
ggctgactcgtacgagtcagcc

SEQ ID NO: 10768 - DNA, 22 bp, Artificial sequence
  Primer
gcccgactcgtacgagtcgggc

SEQ ID NO: 10769 - DNA, 22 bp, Artificial sequence
  Primer
acccgactcgtacgagtcgggt

SEQ ID NO: 10770 - DNA, 22 bp, Artificial sequence
  Primer
gaccgactcgtacgagtcggtc

SEQ ID NO: 10771 - DNA, 22 bp, Artificial sequence
  Primer
gcacgactcgtacgagtcgtgc

SEQ ID NO: 10772 - DNA, 22 bp, Artificial sequence
  Primer
gccagactcgtacgagtctggc

SEQ ID NO: 10773 - DNA, 22 bp, Artificial sequence
  Primer
tcccgactcgtacgagtcggga

SEQ ID NO: 10774 - DNA, 22 bp, Artificial sequence
  Primer
gtccgactcgtacgagtcggac

SEQ ID NO: 10775 - DNA, 22 bp, Artificial sequence
  Primer
gcctgactcgtacgagtcaggc

SEQ ID NO: 10776 - DNA, 22 bp, Artificial sequence
  Primer
gggcgactcgtacgagtcgccc

SEQ ID NO: 10777 - DNA, 22 bp, Artificial sequence
  Primer
aggcgactcgtacgagtcgcct

SEQ ID NO: 10778 - DNA, 22 bp, Artificial sequence
  Primer
gagcgactcgtacgagtcgctc

SEQ ID NO: 10779 - DNA, 22 bp, Artificial sequence
  Primer
ggacgactcgtacgagtcgtcc

SEQ ID NO: 10780 - DNA, 22 bp, Artificial sequence
  Primer
gggagactcgtacgagtctccc

SEQ ID NO: 10781 - DNA, 22 bp, Artificial sequence
  Primer
tggcgactcgtacgagtcgcca

SEQ ID NO: 10782 - DNA, 22 bp, Artificial sequence
  Primer
gtgcgactcgtacgagtcgcac

SEQ ID NO: 10783 - DNA, 22 bp, Artificial sequence
  Primer
gggtgactcgtacgagtcaccc

SEQ ID NO: 10784 - DNA, 22 bp, Artificial sequence
  Primer
acgggactcgtacgagtcccgt

SEQ ID NO: 10785 - DNA, 22 bp, Artificial sequence
  Primer
cagggactcgtacgagtccctg

SEQ ID NO: 10786 - DNA, 22 bp, Artificial sequence
  Primer
ccaggactcgtacgagtcctgg

SEQ ID NO: 10787 - DNA, 22 bp, Artificial sequence
  Primer
ccgagactcgtacgagtctcgg

SEQ ID NO: 10788 - DNA, 22 bp, Artificial sequence
  Primer
tcgggactcgtacgagtcccga

SEQ ID NO: 10789 - DNA, 22 bp, Artificial sequence
  Primer
ctgggactcgtacgagtcccag

SEQ ID NO: 10790 - DNA, 22 bp, Artificial sequence
  Primer
cctggactcgtacgagtccagg

SEQ ID NO: 10791 - DNA, 22 bp, Artificial sequence
  Primer
ccgtgactcgtacgagtcacgg

SEQ ID NO: 10792 - DNA, 22 bp, Artificial sequence
  Primer
cggcgactcgtacgagtcgccg

SEQ ID NO: 10793 - DNA, 22 bp, Artificial sequence
  Primer
cagcgactcgtacgagtcgctg

SEQ ID NO: 10794 - DNA, 22 bp, Artificial sequence
  Primer
cgacgactcgtacgagtcgtcg

SEQ ID NO: 10795 - DNA, 22 bp, Artificial sequence
  Primer
cggagactcgtacgagtctccg

SEQ ID NO: 10796 - DNA, 22 bp, Artificial sequence
  Primer
ctgcgactcgtacgagtcgcag

SEQ ID NO: 10797 - DNA, 22 bp, Artificial sequence
  Primer
cggtgactcgtacgagtcaccg

SEQ ID NO: 10798 - DNA, 22 bp, Artificial sequence
  Primer
cacggactcgtacgagtccgtg

SEQ ID NO: 10799 - DNA, 22 bp, Artificial sequence
  Primer
cccagactcgtacgagtctggg

SEQ ID NO: 10800 - DNA, 22 bp, Artificial sequence
  Primer
ctcggactcgtacgagtccgag

SEQ ID NO: 10801 - DNA, 22 bp, Artificial sequence
  Primer
ccctgactcgtacgagtcaggg

SEQ ID NO: 10802 - DNA, 22 bp, Artificial sequence
  Primer
ccacgactcgtacgagtcgtgg

SEQ ID NO: 10803 - DNA, 22 bp, Artificial sequence
  Primer
agccgactcgtacgagtcggct

SEQ ID NO: 10804 - DNA, 22 bp, Artificial sequence
  Primer
tgccgactcgtacgagtcggca

SEQ ID NO: 10805 - DNA, 22 bp, Artificial sequence
  Primer
gcgagactcgtacgagtctcgc

SEQ ID NO: 10806 - DNA, 22 bp, Artificial sequence
  Primer
gcgtgactcgtacgagtcacgc

SEQ ID NO: 10807 - DNA, 22 bp, Artificial sequence
  Primer
gcaggactcgtacgagtcctgc

SEQ ID NO: 10808 - DNA, 22 bp, Artificial sequence
  Primer
gctggactcgtacgagtccagc

SEQ ID NO: 10809 - DNA, 22 bp, Artificial sequence
  Primer
cgaggactcgtacgagtcctcg

SEQ ID NO: 10810 - DNA, 22 bp, Artificial sequence
  Primer
cgtggactcgtacgagtccacg

SEQ ID NO: 10811 - DNA, 22 bp, Artificial sequence
  Primer
caccgactcgtacgagtcggtg

SEQ ID NO: 10812 - DNA, 22 bp, Artificial sequence
  Primer
ctccgactcgtacgagtcggag

SEQ ID NO: 10813 - DNA, 22 bp, Artificial sequence
  Primer
gcgggactcgtacgagtcccgc

SEQ ID NO: 10814 - DNA, 22 bp, Artificial sequence
  Primer
gagggactcgtacgagtccctc

SEQ ID NO: 10815 - DNA, 22 bp, Artificial sequence
  Primer
gtgggactcgtacgagtcccac

SEQ ID NO: 10816 - DNA, 22 bp, Artificial sequence
  Primer
  misc_feature (1)..(4): n is a, c, g, or t
  misc_feature (19)..(22): n is a, c, g, or t
nnnngactcctaggagtcnnnn

SEQ ID NO: 10817 - DNA, 22 bp, Artificial sequence
  Primer
ggcggactcctaggagtccgcc

SEQ ID NO: 10818 - DNA, 22 bp, Artificial sequence
  Primer
agcggactcctaggagtccgct

SEQ ID NO: 10819 - DNA, 22 bp, Artificial sequence
  Primer
gacggactcctaggagtccgtc

SEQ ID NO: 10820 - DNA, 22 bp, Artificial sequence
  Primer
ggaggactcctaggagtcctcc

SEQ ID NO: 10821 - DNA, 22 bp, Artificial sequence
  Primer
ggcagactcctaggagtctgcc

SEQ ID NO: 10822 - DNA, 22 bp, Artificial sequence
  Primer
tgcggactcctaggagtccgca

SEQ ID NO: 10823 - DNA, 22 bp, Artificial sequence
  Primer
gtcggactcctaggagtccgac

SEQ ID NO: 10824 - DNA, 22 bp, Artificial sequence
  Primer
ggtggactcctaggagtccacc

SEQ ID NO: 10825 - DNA, 22 bp, Artificial sequence
  Primer
ggctgactcctaggagtcagcc

SEQ ID NO: 10826 - DNA, 22 bp, Artificial sequence
  Primer
gcccgactcctaggagtcgggc

SEQ ID NO: 10827 - DNA, 22 bp, Artificial sequence
  Primer
acccgactcctaggagtcgggt

SEQ ID NO: 10828 - DNA, 22 bp, Artificial sequence
  Primer
gaccgactcctaggagtcggtc

SEQ ID NO: 10829 - DNA, 22 bp, Artificial sequence
  Primer
gcacgactcctaggagtcgtgc

SEQ ID NO: 10830 - DNA, 22 bp, Artificial sequence
  Primer
gccagactcctaggagtctggc

SEQ ID NO: 10831 - DNA, 22 bp, Artificial sequence
  Primer
tcccgactcctaggagtcggga

SEQ ID NO: 10832 - DNA, 22 bp, Artificial sequence
  Primer
gtccgactcctaggagtcggac

SEQ ID NO: 10833 - DNA, 22 bp, Artificial sequence
  Primer
gcctgactcctaggagtcaggc

SEQ ID NO: 10834 - DNA, 22 bp, Artificial sequence
  Primer
gggcgactcctaggagtcgccc

SEQ ID NO: 10835 - DNA, 22 bp, Artificial sequence
  Primer
aggcgactcctaggagtcgcct

SEQ ID NO: 10836 - DNA, 22 bp, Artificial sequence
  Primer
gagcgactcctaggagtcgctc

SEQ ID NO: 10837 - DNA, 22 bp, Artificial sequence
  Primer
ggacgactcctaggagtcgtcc

SEQ ID NO: 10838 - DNA, 22 bp, Artificial sequence
  Primer
gggagactcctaggagtctccc

SEQ ID NO: 10839 - DNA, 22 bp, Artificial sequence
  Primer
tggcgactcctaggagtcgcca

SEQ ID NO: 10840 - DNA, 22 bp, Artificial sequence
  Primer
gtgcgactcctaggagtcgcac

SEQ ID NO: 10841 - DNA, 22 bp, Artificial sequence
  Primer
gggtgactcctaggagtcaccc

SEQ ID NO: 10842 - DNA, 22 bp, Artificial sequence
  Primer
acgggactcctaggagtcccgt

SEQ ID NO: 10843 - DNA, 22 bp, Artificial sequence
  Primer
cagggactcctaggagtccctg

SEQ ID NO: 10844 - DNA, 22 bp, Artificial sequence
  Primer
ccaggactcctaggagtcctgg

SEQ ID NO: 10845 - DNA, 22 bp, Artificial sequence
  Primer
ccgagactcctaggagtctcgg

SEQ ID NO: 10846 - DNA, 22 bp, Artificial sequence
  Primer
tcgggactcctaggagtcccga

SEQ ID NO: 10847 - DNA, 22 bp, Artificial sequence
  Primer
ctgggactcctaggagtcccag

SEQ ID NO: 10848 - DNA, 22 bp, Artificial sequence
  Primer
cctggactcctaggagtccagg

SEQ ID NO: 10849 - DNA, 22 bp, Artificial sequence
  Primer
ccgtgactcctaggagtcacgg

SEQ ID NO: 10850 - DNA, 22 bp, Artificial sequence
  Primer
cggcgactcctaggagtcgccg

SEQ ID NO: 10851 - DNA, 22 bp, Artificial sequence
  Primer
cagcgactcctaggagtcgctg

SEQ ID NO: 10852 - DNA, 22 bp, Artificial sequence
  Primer
cgacgactcctaggagtcgtcg

SEQ ID NO: 10853 - DNA, 22 bp, Artificial sequence
  Primer
cggagactcctaggagtctccg

SEQ ID NO: 10854 - DNA, 22 bp, Artificial sequence
  Primer
ctgcgactcctaggagtcgcag

SEQ ID NO: 10855 - DNA, 22 bp, Artificial sequence
  Primer
cggtgactcctaggagtcaccg

SEQ ID NO: 10856 - DNA, 22 bp, Artificial sequence
  Primer
cacggactcctaggagtccgtg

SEQ ID NO: 10857 - DNA, 22 bp, Artificial sequence
  Primer
cccagactcctaggagtctggg

SEQ ID NO: 10858 - DNA, 22 bp, Artificial sequence
  Primer
ctcggactcctaggagtccgag

SEQ ID NO: 10859 - DNA, 22 bp, Artificial sequence
  Primer
ccctgactcctaggagtcaggg

SEQ ID NO: 10860 - DNA, 22 bp, Artificial sequence
  Primer
ccacgactcctaggagtcgtgg

SEQ ID NO: 10861 - DNA, 22 bp, Artificial sequence
  Primer
agccgactcctaggagtcggct

SEQ ID NO: 10862 - DNA, 22 bp, Artificial sequence
  Primer
tgccgactcctaggagtcggca

SEQ ID NO: 10863 - DNA, 22 bp, Artificial sequence
  Primer
gcgagactcctaggagtctcgc

SEQ ID NO: 10864 - DNA, 22 bp, Artificial sequence
  Primer
gcgtgactcctaggagtcacgc

SEQ ID NO: 10865 - DNA, 22 bp, Artificial sequence
  Primer
gcaggactcctaggagtcctgc

SEQ ID NO: 10866 - DNA, 22 bp, Artificial sequence
  Primer
gctggactcctaggagtccagc

SEQ ID NO: 10867 - DNA, 22 bp, Artificial sequence
  Primer
cgaggactcctaggagtcctcg

SEQ ID NO: 10868 - DNA, 22 bp, Artificial sequence
  Primer
cgtggactcctaggagtccacg

SEQ ID NO: 10869 - DNA, 22 bp, Artificial sequence
  Primer
caccgactcctaggagtcggtg

SEQ ID NO: 10870 - DNA, 22 bp, Artificial sequence
  Primer
ctccgactcctaggagtcggag

SEQ ID NO: 10871 - DNA, 22 bp, Artificial sequence
  Primer
gcgggactcctaggagtcccgc

SEQ ID NO: 10872 - DNA, 22 bp, Artificial sequence
  Primer
gagggactcctaggagtccctc

SEQ ID NO: 10873 - DNA, 22 bp, Artificial sequence
  Primer
gtgggactcctaggagtcccac

SEQ ID NO: 10874 - DNA, 22 bp, Artificial sequence
  Primer
  misc_feature (1)..(4): n is a, c, g, or t
  misc_feature (19)..(22): n is a, c, g, or t
nnnngactccatggagtcnnnn

SEQ ID NO: 10875 - DNA, 22 bp, Artificial sequence
  Primer
ggcggactccatggagtccgcc

SEQ ID NO: 10876 - DNA, 22 bp, Artificial sequence
  Primer
agcggactccatggagtccgct

SEQ ID NO: 10877 - DNA, 22 bp, Artificial sequence
  Primer
gacggactccatggagtccgtc

SEQ ID NO: 10878 - DNA, 22 bp, Artificial sequence
  Primer
ggaggactccatggagtcctcc

SEQ ID NO: 10879 - DNA, 22 bp, Artificial sequence
  Primer
ggcagactccatggagtctgcc

SEQ ID NO: 10880 - DNA, 22 bp, Artificial sequence
  Primer
tgcggactccatggagtccgca

SEQ ID NO: 10881 - DNA, 22 bp, Artificial sequence
  Primer
gtcggactccatggagtccgac

SEQ ID NO: 10882 - DNA, 22 bp, Artificial sequence
  Primer
ggtggactccatggagtccacc

SEQ ID NO: 10883 - DNA, 22 bp, Artificial sequence
  Primer
ggctgactccatggagtcagcc

SEQ ID NO: 10884 - DNA, 22 bp, Artificial sequence
  Primer
gcccgactccatggagtcgggc

SEQ ID NO: 10885 - DNA, 22 bp, Artificial sequence
  Primer
acccgactccatggagtcgggt

SEQ ID NO: 10886 - DNA, 22 bp, Artificial sequence
  Primer
gaccgactccatggagtcggtc

SEQ ID NO: 10887 - DNA, 22 bp, Artificial sequence
  Primer
gcacgactccatggagtcgtgc

SEQ ID NO: 10888 - DNA, 22 bp, Artificial sequence
  Primer
gccagactccatggagtctggc

SEQ ID NO: 10889 - DNA, 22 bp, Artificial sequence
  Primer
tcccgactccatggagtcggga

SEQ ID NO: 10890 - DNA, 22 bp, Artificial sequence
  Primer
gtccgactccatggagtcggac

SEQ ID NO: 10891 - DNA, 22 bp, Artificial sequence
  Primer
gcctgactccatggagtcaggc

SEQ ID NO: 10892 - DNA, 22 bp, Artificial sequence
  Primer
gggcgactccatggagtcgccc

SEQ ID NO: 10893 - DNA, 22 bp, Artificial sequence
  Primer
aggcgactccatggagtcgcct

SEQ ID NO: 10894 - DNA, 22 bp, Artificial sequence
  Primer
gagcgactccatggagtcgctc

SEQ ID NO: 10895 - DNA, 22 bp, Artificial sequence
  Primer
ggacgactccatggagtcgtcc

SEQ ID NO: 10896 - DNA, 22 bp, Artificial sequence
  Primer
gggagactccatggagtctccc

SEQ ID NO: 10897 - DNA, 22 bp, Artificial sequence
  Primer
tggcgactccatggagtcgcca

SEQ ID NO: 10898 - DNA, 22 bp, Artificial sequence
  Primer
gtgcgactccatggagtcgcac

SEQ ID NO: 10899 - DNA, 22 bp, Artificial sequence
  Primer
gggtgactccatggagtcaccc

SEQ ID NO: 10900 - DNA, 22 bp, Artificial sequence
  Primer
acgggactccatggagtcccgt

SEQ ID NO: 10901 - DNA, 22 bp, Artificial sequence
  Primer
cagggactccatggagtccctg

SEQ ID NO: 10902 - DNA, 22 bp, Artificial sequence
  Primer
ccaggactccatggagtcctgg

SEQ ID NO: 10903 - DNA, 22 bp, Artificial sequence
  Primer
ccgagactccatggagtctcgg

SEQ ID NO: 10904 - DNA, 22 bp, Artificial sequence
  Primer
tcgggactccatggagtcccga

SEQ ID NO: 10905 - DNA, 22 bp, Artificial sequence
  Primer
ctgggactccatggagtcccag

SEQ ID NO: 10906 - DNA, 22 bp, Artificial sequence
  Primer
cctggactccatggagtccagg

SEQ ID NO: 10907 - DNA, 22 bp, Artificial sequence
  Primer
ccgtgactccatggagtcacgg

SEQ ID NO: 10908 - DNA, 22 bp, Artificial sequence
  Primer
cggcgactccatggagtcgccg

SEQ ID NO: 10909 - DNA, 22 bp, Artificial sequence
  Primer
cagcgactccatggagtcgctg

SEQ ID NO: 10910 - DNA, 22 bp, Artificial sequence
  Primer
cgacgactccatggagtcgtcg

SEQ ID NO: 10911 - DNA, 22 bp, Artificial sequence
  Primer
cggagactccatggagtctccg

SEQ ID NO: 10912 - DNA, 22 bp, Artificial sequence
  Primer
ctgcgactccatggagtcgcag

SEQ ID NO: 10913 - DNA, 22 bp, Artificial sequence
  Primer
cggtgactccatggagtcaccg

SEQ ID NO: 10914 - DNA, 22 bp, Artificial sequence
  Primer
cacggactccatggagtccgtg

SEQ ID NO: 10915 - DNA, 22 bp, Artificial sequence
  Primer
cccagactccatggagtctggg

SEQ ID NO: 10916 - DNA, 22 bp, Artificial sequence
  Primer
ctcggactccatggagtccgag

SEQ ID NO: 10917 - DNA, 22 bp, Artificial sequence
  Primer
ccctgactccatggagtcaggg

SEQ ID NO: 10918 - DNA, 22 bp, Artificial sequence
  Primer
ccacgactccatggagtcgtgg

SEQ ID NO: 10919 - DNA, 22 bp, Artificial sequence
  Primer
agccgactccatggagtcggct

SEQ ID NO: 10920 - DNA, 22 bp, Artificial sequence
  Primer
tgccgactccatggagtcggca

SEQ ID NO: 10921 - DNA, 22 bp, Artificial sequence
  Primer
gcgagactccatggagtctcgc

SEQ ID NO: 10922 - DNA, 22 bp, Artificial sequence
  Primer
gcgtgactccatggagtcacgc

SEQ ID NO: 10923 - DNA, 22 bp, Artificial sequence
  Primer
gcaggactccatggagtcctgc

SEQ ID NO: 10924 - DNA, 22 bp, Artificial sequence
  Primer
gctggactccatggagtccagc

SEQ ID NO: 10925 - DNA, 22 bp, Artificial sequence
  Primer
cgaggactccatggagtcctcg

SEQ ID NO: 10926 - DNA, 22 bp, Artificial sequence
  Primer
cgtggactccatggagtccacg

SEQ ID NO: 10927 - DNA, 22 bp, Artificial sequence
  Primer
caccgactccatggagtcggtg

SEQ ID NO: 10928 - DNA, 22 bp, Artificial sequence
  Primer
ctccgactccatggagtcggag

SEQ ID NO: 10929 - DNA, 22 bp, Artificial sequence
  Primer
gcgggactccatggagtcccgc

SEQ ID NO: 10930 - DNA, 22 bp, Artificial sequence
  Primer
gagggactccatggagtccctc

SEQ ID NO: 10931 - DNA, 22 bp, Artificial sequence
  Primer
gtgggactccatggagtcccac

SEQ ID NO: 10932 - DNA, 22 bp, Artificial sequence
  Primer
  misc_feature (1)..(4): n is a, c, g, or t
  misc_feature (19)..(22): n is a, c, g, or t
nnnngactctcgagagtcnnnn

SEQ ID NO: 10933 - DNA, 22 bp, Artificial sequence
  Primer
ggcggactctcgagagtccgcc

SEQ ID NO: 10934 - DNA, 22 bp, Artificial sequence
  Primer
agcggactctcgagagtccgct

SEQ ID NO: 10935 - DNA, 22 bp, Artificial sequence
  Primer
gacggactctcgagagtccgtc

SEQ ID NO: 10936 - DNA, 22 bp, Artificial sequence
  Primer
ggaggactctcgagagtcctcc

SEQ ID NO: 10937 - DNA, 22 bp, Artificial sequence
  Primer
ggcagactctcgagagtctgcc

SEQ ID NO: 10938 - DNA, 22 bp, Artificial sequence
  Primer
tgcggactctcgagagtccgca

SEQ ID NO: 10939 - DNA, 22 bp, Artificial sequence
  Primer
gtcggactctcgagagtccgac

SEQ ID NO: 10940 - DNA, 22 bp, Artificial sequence
  Primer
ggtggactctcgagagtccacc

SEQ ID NO: 10941 - DNA, 22 bp, Artificial sequence
  Primer
ggctgactctcgagagtcagcc

SEQ ID NO: 10942 - DNA, 22 bp, Artificial sequence
  Primer
gcccgactctcgagagtcgggc

SEQ ID NO: 10943 - DNA, 22 bp, Artificial sequence
  Primer
acccgactctcgagagtcgggt

SEQ ID NO: 10944 - DNA, 22 bp, Artificial sequence
  Primer
gaccgactctcgagagtcggtc

SEQ ID NO: 10945 - DNA, 22 bp, Artificial sequence
  Primer
gcacgactctcgagagtcgtgc

SEQ ID NO: 10946 - DNA, 22 bp, Artificial sequence
  Primer
gccagactctcgagagtctggc

SEQ ID NO: 10947 - DNA, 22 bp, Artificial sequence
  Primer
tcccgactctcgagagtcggga

SEQ ID NO: 10948 - DNA, 22 bp, Artificial sequence
  Primer
gtccgactctcgagagtcggac

SEQ ID NO: 10949 - DNA, 22 bp, Artificial sequence
  Primer
gcctgactctcgagagtcaggc

SEQ ID NO: 10950 - DNA, 22 bp, Artificial sequence
  Primer
gggcgactctcgagagtcgccc

SEQ ID NO: 10951 - DNA, 22 bp, Artificial sequence
  Primer
aggcgactctcgagagtcgcct

SEQ ID NO: 10952 - DNA, 22 bp, Artificial sequence
  Primer
gagcgactctcgagagtcgctc

SEQ ID NO: 10953 - DNA, 22 bp, Artificial sequence
  Primer
ggacgactctcgagagtcgtcc

SEQ ID NO: 10954 - DNA, 22 bp, Artificial sequence
  Primer
gggagactctcgagagtctccc

SEQ ID NO: 10955 - DNA, 22 bp, Artificial sequence
  Primer
tggcgactctcgagagtcgcca

SEQ ID NO: 10956 - DNA, 22 bp, Artificial sequence
  Primer
gtgcgactctcgagagtcgcac

SEQ ID NO: 10957 - DNA, 22 bp, Artificial sequence
  Primer
gggtgactctcgagagtcaccc

SEQ ID NO: 10958 - DNA, 22 bp, Artificial sequence
  Primer
acgggactctcgagagtcccgt

SEQ ID NO: 10959 - DNA, 22 bp, Artificial sequence
  Primer
cagggactctcgagagtccctg

SEQ ID NO: 10960 - DNA, 22 bp, Artificial sequence
  Primer
ccaggactctcgagagtcctgg

SEQ ID NO: 10961 - DNA, 22 bp, Artificial sequence
  Primer
ccgagactctcgagagtctcgg

SEQ ID NO: 10962 - DNA, 22 bp, Artificial sequence
  Primer
tcgggactctcgagagtcccga

SEQ ID NO: 10963 - DNA, 22 bp, Artificial sequence
  Primer
ctgggactctcgagagtcccag

SEQ ID NO: 10964 - DNA, 22 bp, Artificial sequence
  Primer
cctggactctcgagagtccagg

SEQ ID NO: 10965 - DNA, 22 bp, Artificial sequence
  Primer
ccgtgactctcgagagtcacgg

SEQ ID NO: 10966 - DNA, 22 bp, Artificial sequence
  Primer
cggcgactctcgagagtcgccg

SEQ ID NO: 10967 - DNA, 22 bp, Artificial sequence
  Primer
cagcgactctcgagagtcgctg

SEQ ID NO: 10968 - DNA, 22 bp, Artificial sequence
  Primer
cgacgactctcgagagtcgtcg

SEQ ID NO: 10969 - DNA, 22 bp, Artificial sequence
  Primer
cggagactctcgagagtctccg

SEQ ID NO: 10970 - DNA, 22 bp, Artificial sequence
  Primer
ctgcgactctcgagagtcgcag

SEQ ID NO: 10971 - DNA, 22 bp, Artificial sequence
  Primer
cggtgactctcgagagtcaccg

SEQ ID NO: 10972 - DNA, 22 bp, Artificial sequence
  Primer
cacggactctcgagagtccgtg

SEQ ID NO: 10973 - DNA, 22 bp, Artificial sequence
  Primer
cccagactctcgagagtctggg

SEQ ID NO: 10974 - DNA, 22 bp, Artificial sequence
  Primer
ctcggactctcgagagtccgag

SEQ ID NO: 10975 - DNA, 22 bp, Artificial sequence
  Primer
ccctgactctcgagagtcaggg

SEQ ID NO: 10976 - DNA, 22 bp, Artificial sequence
  Primer
ccacgactctcgagagtcgtgg

SEQ ID NO: 10977 - DNA, 22 bp, Artificial sequence
  Primer
agccgactctcgagagtcggct

SEQ ID NO: 10978 - DNA, 22 bp, Artificial sequence
  Primer
tgccgactctcgagagtcggca

SEQ ID NO: 10979 - DNA, 22 bp, Artificial sequence
  Primer
gcgagactctcgagagtctcgc

SEQ ID NO: 10980 - DNA, 22 bp, Artificial sequence
  Primer
gcgtgactctcgagagtcacgc

SEQ ID NO: 10981 - DNA, 22 bp, Artificial sequence
  Primer
gcaggactctcgagagtcctgc

SEQ ID NO: 10982 - DNA, 22 bp, Artificial sequence
  Primer
gctggactctcgagagtccagc

SEQ ID NO: 10983 - DNA, 22 bp, Artificial sequence
  Primer
cgaggactctcgagagtcctcg

SEQ ID NO: 10984 - DNA, 22 bp, Artificial sequence
  Primer
cgtggactctcgagagtccacg

SEQ ID NO: 10985 - DNA, 22 bp, Artificial sequence
  Primer
caccgactctcgagagtcggtg

SEQ ID NO: 10986 - DNA, 22 bp, Artificial sequence
  Primer
ctccgactctcgagagtcggag

SEQ ID NO: 10987 - DNA, 22 bp, Artificial sequence
  Primer
gcgggactctcgagagtcccgc

SEQ ID NO: 10988 - DNA, 22 bp, Artificial sequence
  Primer
gagggactctcgagagtccctc

SEQ ID NO: 10989 - DNA, 22 bp, Artificial sequence
  Primer
gtgggactctcgagagtcccac

SEQ ID NO: 10990 - DNA, 22 bp, Artificial sequence
  Primer
  misc_feature (1)..(4): n is a, c, g, or t
  misc_feature (19)..(22): n is a, c, g, or t
nnnngactcagctgagtcnnnn

SEQ ID NO: 10991 - DNA, 22 bp, Artificial sequence
  Primer
ggcggactcagctgagtccgcc

SEQ ID NO: 10992 - DNA, 22 bp, Artificial sequence
  Primer
agcggactcagctgagtccgct

SEQ ID NO: 10993 - DNA, 22 bp, Artificial sequence
  Primer
gacggactcagctgagtccgtc

SEQ ID NO: 10994 - DNA, 22 bp, Artificial sequence
  Primer
ggaggactcagctgagtcctcc

SEQ ID NO: 10995 - DNA, 22 bp, Artificial sequence
  Primer
ggcagactcagctgagtctgcc

SEQ ID NO: 10996 - DNA, 22 bp, Artificial sequence
  Primer
tgcggactcagctgagtccgca

SEQ ID NO: 10997 - DNA, 22 bp, Artificial sequence
  Primer
gtcggactcagctgagtccgac

SEQ ID NO: 10998 - DNA, 22 bp, Artificial sequence
  Primer
ggtggactcagctgagtccacc

SEQ ID NO: 10999 - DNA, 22 bp, Artificial sequence
  Primer
ggctgactcagctgagtcagcc

SEQ ID NO: 11000 - DNA, 22 bp, Artificial sequence
  Primer
gcccgactcagctgagtcgggc

SEQ ID NO: 11001 - DNA, 22 bp, Artificial sequence
  Primer
acccgactcagctgagtcgggt

SEQ ID NO: 11002 - DNA, 22 bp, Artificial sequence
  Primer
gaccgactcagctgagtcggtc

SEQ ID NO: 11003 - DNA, 22 bp, Artificial sequence
  Primer
gcacgactcagctgagtcgtgc

SEQ ID NO: 11004 - DNA, 22 bp, Artificial sequence
  Primer
gccagactcagctgagtctggc

SEQ ID NO: 11005 - DNA, 22 bp, Artificial sequence
  Primer
tcccgactcagctgagtcggga

SEQ ID NO: 11006 - DNA, 22 bp, Artificial sequence
  Primer
gtccgactcagctgagtcggac

SEQ ID NO: 11007 - DNA, 22 bp, Artificial sequence
  Primer
gcctgactcagctgagtcaggc

SEQ ID NO: 11008 - DNA, 22 bp, Artificial sequence
  Primer
gggcgactcagctgagtcgccc

SEQ ID NO: 11009 - DNA, 22 bp, Artificial sequence
  Primer
aggcgactcagctgagtcgcct

SEQ ID NO: 11010 - DNA, 22 bp, Artificial sequence
  Primer
gagcgactcagctgagtcgctc

SEQ ID NO: 11011 - DNA, 22 bp, Artificial sequence
  Primer
ggacgactcagctgagtcgtcc

SEQ ID NO: 11012 - DNA, 22 bp, Artificial sequence
  Primer
gggagactcagctgagtctccc

SEQ ID NO: 11013 - DNA, 22 bp, Artificial sequence
  Primer
tggcgactcagctgagtcgcca

SEQ ID NO: 11014 - DNA, 22 bp, Artificial sequence
  Primer
gtgcgactcagctgagtcgcac

SEQ ID NO: 11015 - DNA, 22 bp, Artificial sequence
  Primer
gggtgactcagctgagtcaccc

SEQ ID NO: 11016 - DNA, 22 bp, Artificial sequence
  Primer
acgggactcagctgagtcccgt

SEQ ID NO: 11017 - DNA, 22 bp, Artificial sequence
  Primer
cagggactcagctgagtccctg

SEQ ID NO: 11018 - DNA, 22 bp, Artificial sequence
  Primer
ccaggactcagctgagtcctgg

SEQ ID NO: 11019 - DNA, 22 bp, Artificial sequence
  Primer
ccgagactcagctgagtctcgg

SEQ ID NO: 11020 - DNA, 22 bp, Artificial sequence
  Primer
tcgggactcagctgagtcccga

SEQ ID NO: 11021 - DNA, 22 bp, Artificial sequence
  Primer
ctgggactcagctgagtcccag

SEQ ID NO: 11022 - DNA, 22 bp, Artificial sequence
  Primer
cctggactcagctgagtccagg

SEQ ID NO: 11023 - DNA, 22 bp, Artificial sequence
  Primer
ccgtgactcagctgagtcacgg

SEQ ID NO: 11024 - DNA, 22 bp, Artificial sequence
  Primer
cggcgactcagctgagtcgccg

SEQ ID NO: 11025 - DNA, 22 bp, Artificial sequence
  Primer
cagcgactcagctgagtcgctg

SEQ ID NO: 11026 - DNA, 22 bp, Artificial sequence
  Primer
cgacgactcagctgagtcgtcg

SEQ ID NO: 11027 - DNA, 22 bp, Artificial sequence
  Primer
cggagactcagctgagtctccg

SEQ ID NO: 11028 - DNA, 22 bp, Artificial sequence
  Primer
ctgcgactcagctgagtcgcag

SEQ ID NO: 11029 - DNA, 22 bp, Artificial sequence
  Primer
cggtgactcagctgagtcaccg

SEQ ID NO: 11030 - DNA, 22 bp, Artificial sequence
  Primer
cacggactcagctgagtccgtg

SEQ ID NO: 11031 - DNA, 22 bp, Artificial sequence
  Primer
cccagactcagctgagtctggg

SEQ ID NO: 11032 - DNA, 22 bp, Artificial sequence
  Primer
ctcggactcagctgagtccgag

SEQ ID NO: 11033 - DNA, 22 bp, Artificial sequence
  Primer
ccctgactcagctgagtcaggg

SEQ ID NO: 11034 - DNA, 22 bp, Artificial sequence
  Primer
ccacgactcagctgagtcgtgg

SEQ ID NO: 11035 - DNA, 22 bp, Artificial sequence
  Primer
agccgactcagctgagtcggct

SEQ ID NO: 11036 - DNA, 22 bp, Artificial sequence
  Primer
tgccgactcagctgagtcggca

SEQ ID NO: 11037 - DNA, 22 bp, Artificial sequence
  Primer
gcgagactcagctgagtctcgc

SEQ ID NO: 11038 - DNA, 22 bp, Artificial sequence
  Primer
gcgtgactcagctgagtcacgc

SEQ ID NO: 11039 - DNA, 22 bp, Artificial sequence
  Primer
gcaggactcagctgagtcctgc

SEQ ID NO: 11040 - DNA, 22 bp, Artificial sequence
  Primer
gctggactcagctgagtccagc

SEQ ID NO: 11041 - DNA, 22 bp, Artificial sequence
  Primer
cgaggactcagctgagtcctcg

SEQ ID NO: 11042 - DNA, 22 bp, Artificial sequence
  Primer
cgtggactcagctgagtccacg

SEQ ID NO: 11043 - DNA, 22 bp, Artificial sequence
  Primer
caccgactcagctgagtcggtg

SEQ ID NO: 11044 - DNA, 22 bp, Artificial sequence
  Primer
ctccgactcagctgagtcggag

SEQ ID NO: 11045 - DNA, 22 bp, Artificial sequence
  Primer
gcgggactcagctgagtcccgc

SEQ ID NO: 11046 - DNA, 22 bp, Artificial sequence
  Primer
gagggactcagctgagtccctc

SEQ ID NO: 11047 - DNA, 22 bp, Artificial sequence
  Primer
gtgggactcagctgagtcccac

SEQ ID NO: 11048 - DNA, 22 bp, Artificial sequence
  Primer
  misc_feature (1)..(4): n is a, c, g, or t
  misc_feature (19)..(22): n is a, c, g, or t
nnnngactcaattgagtcnnnn

SEQ ID NO: 11049 - DNA, 22 bp, Artificial sequence
  Primer
ggcggactcaattgagtccgcc

SEQ ID NO: 11050 - DNA, 22 bp, Artificial sequence
  Primer
agcggactcaattgagtccgct

SEQ ID NO: 11051 - DNA, 22 bp, Artificial sequence
  Primer
gacggactcaattgagtccgtc

SEQ ID NO: 11052 - DNA, 22 bp, Artificial sequence
  Primer
ggaggactcaattgagtcctcc

SEQ ID NO: 11053 - DNA, 22 bp, Artificial sequence
  Primer
ggcagactcaattgagtctgcc

SEQ ID NO: 11054 - DNA, 22 bp, Artificial sequence
  Primer
tgcggactcaattgagtccgca

SEQ ID NO: 11055 - DNA, 22 bp, Artificial sequence
  Primer
gtcggactcaattgagtccgac

SEQ ID NO: 11056 - DNA, 22 bp, Artificial sequence
  Primer
ggtggactcaattgagtccacc

SEQ ID NO: 11057 - DNA, 22 bp, Artificial sequence
  Primer
ggctgactcaattgagtcagcc

SEQ ID NO: 11058 - DNA, 22 bp, Artificial sequence
  Primer
gcccgactcaattgagtcgggc

SEQ ID NO: 11059 - DNA, 22 bp, Artificial sequence
  Primer
acccgactcaattgagtcgggt

SEQ ID NO: 11060 - DNA, 22 bp, Artificial sequence
  Primer
gaccgactcaattgagtcggtc

SEQ ID NO: 11061 - DNA, 22 bp, Artificial sequence
  Primer
gcacgactcaattgagtcgtgc

SEQ ID NO: 11062 - DNA, 22 bp, Artificial sequence
  Primer
gccagactcaattgagtctggc

SEQ ID NO: 11063 - DNA, 22 bp, Artificial sequence
  Primer
tcccgactcaattgagtcggga

SEQ ID NO: 11064 - DNA, 22 bp, Artificial sequence
  Primer
gtccgactcaattgagtcggac

SEQ ID NO: 11065 - DNA, 22 bp, Artificial sequence
  Primer
gcctgactcaattgagtcaggc

SEQ ID NO: 11066 - DNA, 22 bp, Artificial sequence
  Primer
gggcgactcaattgagtcgccc

SEQ ID NO: 11067 - DNA, 22 bp, Artificial sequence
  Primer
aggcgactcaattgagtcgcct

SEQ ID NO: 11068 - DNA, 22 bp, Artificial sequence
  Primer
gagcgactcaattgagtcgctc

SEQ ID NO: 11069 - DNA, 22 bp, Artificial sequence
  Primer
ggacgactcaattgagtcgtcc

SEQ ID NO: 11070 - DNA, 22 bp, Artificial sequence
  Primer
gggagactcaattgagtctccc

SEQ ID NO: 11071 - DNA, 22 bp, Artificial sequence
  Primer
tggcgactcaattgagtcgcca

SEQ ID NO: 11072 - DNA, 22 bp, Artificial sequence
  Primer
gtgcgactcaattgagtcgcac

SEQ ID NO: 11073 - DNA, 22 bp, Artificial sequence
  Primer
gggtgactcaattgagtcaccc

SEQ ID NO: 11074 - DNA, 22 bp, Artificial sequence
  Primer
acgggactcaattgagtcccgt

SEQ ID NO: 11075 - DNA, 22 bp, Artificial sequence
  Primer
cagggactcaattgagtccctg

SEQ ID NO: 11076 - DNA, 22 bp, Artificial sequence
  Primer
ccaggactcaattgagtcctgg

SEQ ID NO: 11077 - DNA, 22 bp, Artificial sequence
  Primer
ccgagactcaattgagtctcgg

SEQ ID NO: 11078 - DNA, 22 bp, Artificial sequence
  Primer
tcgggactcaattgagtcccga

SEQ ID NO: 11079 - DNA, 22 bp, Artificial sequence
  Primer
ctgggactcaattgagtcccag

SEQ ID NO: 11080 - DNA, 22 bp, Artificial sequence
  Primer
cctggactcaattgagtccagg

SEQ ID NO: 11081 - DNA, 22 bp, Artificial sequence
  Primer
ccgtgactcaattgagtcacgg

SEQ ID NO: 11082 - DNA, 22 bp, Artificial sequence
  Primer
cggcgactcaattgagtcgccg

SEQ ID NO: 11083 - DNA, 22 bp, Artificial sequence
  Primer
cagcgactcaattgagtcgctg

SEQ ID NO: 11084 - DNA, 22 bp, Artificial sequence
  Primer
cgacgactcaattgagtcgtcg

SEQ ID NO: 11085 - DNA, 22 bp, Artificial sequence
  Primer
cggagactcaattgagtctccg

SEQ ID NO: 11086 - DNA, 22 bp, Artificial sequence
  Primer
ctgcgactcaattgagtcgcag

SEQ ID NO: 11087 - DNA, 22 bp, Artificial sequence
  Primer
cggtgactcaattgagtcaccg

SEQ ID NO: 11088 - DNA, 22 bp, Artificial sequence
  Primer
cacggactcaattgagtccgtg

SEQ ID NO: 11089 - DNA, 22 bp, Artificial sequence
  Primer
cccagactcaattgagtctggg

SEQ ID NO: 11090 - DNA, 22 bp, Artificial sequence
  Primer
ctcggactcaattgagtccgag

SEQ ID NO: 11091 - DNA, 22 bp, Artificial sequence
  Primer
ccctgactcaattgagtcaggg

SEQ ID NO: 11092 - DNA, 22 bp, Artificial sequence
  Primer
ccacgactcaattgagtcgtgg

SEQ ID NO: 11093 - DNA, 22 bp, Artificial sequence
  Primer
agccgactcaattgagtcggct

SEQ ID NO: 11094 - DNA, 22 bp, Artificial sequence
  Primer
tgccgactcaattgagtcggca

SEQ ID NO: 11095 - DNA, 22 bp, Artificial sequence
  Primer
gcgagactcaattgagtctcgc

SEQ ID NO: 11096 - DNA, 22 bp, Artificial sequence
  Primer
gcgtgactcaattgagtcacgc

SEQ ID NO: 11097 - DNA, 22 bp, Artificial sequence
  Primer
gcaggactcaattgagtcctgc

SEQ ID NO: 11098 - DNA, 22 bp, Artificial sequence
  Primer
gctggactcaattgagtccagc

SEQ ID NO: 11099 - DNA, 22 bp, Artificial sequence
  Primer
cgaggactcaattgagtcctcg

SEQ ID NO: 11100 - DNA, 22 bp, Artificial sequence
  Primer
cgtggactcaattgagtccacg

SEQ ID NO: 11101 - DNA, 22 bp, Artificial sequence
  Primer
caccgactcaattgagtcggtg

SEQ ID NO: 11102 - DNA, 22 bp, Artificial sequence
  Primer
ctccgactcaattgagtcggag

SEQ ID NO: 11103 - DNA, 22 bp, Artificial sequence
  Primer
gcgggactcaattgagtcccgc

SEQ ID NO: 11104 - DNA, 22 bp, Artificial sequence
  Primer
gagggactcaattgagtccctc

SEQ ID NO: 11105 - DNA, 22 bp, Artificial sequence
  Primer
gtgggactcaattgagtcccac

SEQ ID NO: 11106 - DNA, 22 bp, Artificial sequence
  Primer
  misc_feature (1)..(4): n is a, c, g, or t
  misc_feature (19)..(22): n is a, c, g, or t
nnnngactctatagagtcnnnn

SEQ ID NO: 11107 - DNA, 22 bp, Artificial sequence
  Primer
ggcggactctatagagtccgcc

SEQ ID NO: 11108 - DNA, 22 bp, Artificial sequence
  Primer
agcggactctatagagtccgct

SEQ ID NO: 11109 - DNA, 22 bp, Artificial sequence
  Primer
gacggactctatagagtccgtc

SEQ ID NO: 11110 - DNA, 22 bp, Artificial sequence
  Primer
ggaggactctatagagtcctcc

SEQ ID NO: 11111 - DNA, 22 bp, Artificial sequence
  Primer
ggcagactctatagagtctgcc

SEQ ID NO: 11112 - DNA, 22 bp, Artificial sequence
  Primer
tgcggactctatagagtccgca

SEQ ID NO: 11113 - DNA, 22 bp, Artificial sequence
  Primer
gtcggactctatagagtccgac

SEQ ID NO: 11114 - DNA, 22 bp, Artificial sequence
  Primer
ggtggactctatagagtccacc

SEQ ID NO: 11115 - DNA, 22 bp, Artificial sequence
  Primer
ggctgactctatagagtcagcc

SEQ ID NO: 11116 - DNA, 22 bp, Artificial sequence
  Primer
gcccgactctatagagtcgggc

SEQ ID NO: 11117 - DNA, 22 bp, Artificial sequence
  Primer
acccgactctatagagtcgggt

SEQ ID NO: 11118 - DNA, 22 bp, Artificial sequence
  Primer
gaccgactctatagagtcggtc

SEQ ID NO: 11119 - DNA, 22 bp, Artificial sequence
  Primer
gcacgactctatagagtcgtgc

SEQ ID NO: 11120 - DNA, 22 bp, Artificial sequence
  Primer
gccagactctatagagtctggc

SEQ ID NO: 11121 - DNA, 22 bp, Artificial sequence
  Primer
tcccgactctatagagtcggga

SEQ ID NO: 11122 - DNA, 22 bp, Artificial sequence
  Primer
gtccgactctatagagtcggac

SEQ ID NO: 11123 - DNA, 22 bp, Artificial sequence
  Primer
gcctgactctatagagtcaggc

SEQ ID NO: 11124 - DNA, 22 bp, Artificial sequence
  Primer
gggcgactctatagagtcgccc

SEQ ID NO: 11125 - DNA, 22 bp, Artificial sequence
  Primer
aggcgactctatagagtcgcct

SEQ ID NO: 11126 - DNA, 22 bp, Artificial sequence
  Primer
gagcgactctatagagtcgctc

SEQ ID NO: 11127 - DNA, 22 bp, Artificial sequence
  Primer
ggacgactctatagagtcgtcc

SEQ ID NO: 11128 - DNA, 22 bp, Artificial sequence
  Primer
gggagactctatagagtctccc

SEQ ID NO: 11129 - DNA, 22 bp, Artificial sequence
  Primer
tggcgactctatagagtcgcca

SEQ ID NO: 11130 - DNA, 22 bp, Artificial sequence
  Primer
gtgcgactctatagagtcgcac

SEQ ID NO: 11131 - DNA, 22 bp, Artificial sequence
  Primer
gggtgactctatagagtcaccc

SEQ ID NO: 11132 - DNA, 22 bp, Artificial sequence
  Primer
acgggactctatagagtcccgt

SEQ ID NO: 11133 - DNA, 22 bp, Artificial sequence
  Primer
cagggactctatagagtccctg

SEQ ID NO: 11134 - DNA, 22 bp, Artificial sequence
  Primer
ccaggactctatagagtcctgg

SEQ ID NO: 11135 - DNA, 22 bp, Artificial sequence
  Primer
ccgagactctatagagtctcgg

SEQ ID NO: 11136 - DNA, 22 bp, Artificial sequence
  Primer
tcgggactctatagagtcccga

SEQ ID NO: 11137 - DNA, 22 bp, Artificial sequence
  Primer
ctgggactctatagagtcccag

SEQ ID NO: 11138 - DNA, 22 bp, Artificial sequence
  Primer
cctggactctatagagtccagg

SEQ ID NO: 11139 - DNA, 22 bp, Artificial sequence
  Primer
ccgtgactctatagagtcacgg

SEQ ID NO: 11140 - DNA, 22 bp, Artificial sequence
  Primer
cggcgactctatagagtcgccg

SEQ ID NO: 11141 - DNA, 22 bp, Artificial sequence
  Primer
cagcgactctatagagtcgctg

SEQ ID NO: 11142 - DNA, 22 bp, Artificial sequence
  Primer
cgacgactctatagagtcgtcg

SEQ ID NO: 11143 - DNA, 22 bp, Artificial sequence
  Primer
cggagactctatagagtctccg

SEQ ID NO: 11144 - DNA, 22 bp, Artificial sequence
  Primer
ctgcgactctatagagtcgcag

SEQ ID NO: 11145 - DNA, 22 bp, Artificial sequence
  Primer
cggtgactctatagagtcaccg

SEQ ID NO: 11146 - DNA, 22 bp, Artificial sequence
  Primer
cacggactctatagagtccgtg

SEQ ID NO: 11147 - DNA, 22 bp, Artificial sequence
  Primer
cccagactctatagagtctggg

SEQ ID NO: 11148 - DNA, 22 bp, Artificial sequence
  Primer
ctcggactctatagagtccgag

SEQ ID NO: 11149 - DNA, 22 bp, Artificial sequence
  Primer
ccctgactctatagagtcaggg

SEQ ID NO: 11150 - DNA, 22 bp, Artificial sequence
  Primer
ccacgactctatagagtcgtgg

SEQ ID NO: 11151 - DNA, 22 bp, Artificial sequence
  Primer
agccgactctatagagtcggct

SEQ ID NO: 11152 - DNA, 22 bp, Artificial sequence
  Primer
tgccgactctatagagtcggca

SEQ ID NO: 11153 - DNA, 22 bp, Artificial sequence
  Primer
gcgagactctatagagtctcgc

SEQ ID NO: 11154 - DNA, 22 bp, Artificial sequence
  Primer
gcgtgactctatagagtcacgc

SEQ ID NO: 11155 - DNA, 22 bp, Artificial sequence
  Primer
gcaggactctatagagtcctgc

SEQ ID NO: 11156 - DNA, 22 bp, Artificial sequence
  Primer
gctggactctatagagtccagc

SEQ ID NO: 11157 - DNA, 22 bp, Artificial sequence
  Primer
cgaggactctatagagtcctcg

SEQ ID NO: 11158 - DNA, 22 bp, Artificial sequence
  Primer
cgtggactctatagagtccacg

SEQ ID NO: 11159 - DNA, 22 bp, Artificial sequence
  Primer
caccgactctatagagtcggtg

SEQ ID NO: 11160 - DNA, 22 bp, Artificial sequence
  Primer
ctccgactctatagagtcggag

SEQ ID NO: 11161 - DNA, 22 bp, Artificial sequence
  Primer
gcgggactctatagagtcccgc

SEQ ID NO: 11162 - DNA, 22 bp, Artificial sequence
  Primer
gagggactctatagagtccctc

SEQ ID NO: 11163 - DNA, 22 bp, Artificial sequence
  Primer
gtgggactctatagagtcccac

SEQ ID NO: 11164 - DNA, 22 bp, Artificial sequence
  Primer
  misc_feature (1)..(4): n is a, c, g, or t
  misc_feature (19)..(22): n is a, c, g, or t
nnnngactcatatgagtcnnnn

SEQ ID NO: 11165 - DNA, 22 bp, Artificial sequence
  Primer
ggcggactcatatgagtccgcc

SEQ ID NO: 11166 - DNA, 22 bp, Artificial sequence
  Primer
agcggactcatatgagtccgct

SEQ ID NO: 11167 - DNA, 22 bp, Artificial sequence
  Primer
gacggactcatatgagtccgtc

SEQ ID NO: 11168 - DNA, 22 bp, Artificial sequence
  Primer
ggaggactcatatgagtcctcc

SEQ ID NO: 11169 - DNA, 22 bp, Artificial sequence
  Primer
ggcagactcatatgagtctgcc

SEQ ID NO: 11170 - DNA, 22 bp, Artificial sequence
  Primer
tgcggactcatatgagtccgca

SEQ ID NO: 11171 - DNA, 22 bp, Artificial sequence
  Primer
gtcggactcatatgagtccgac

SEQ ID NO: 11172 - DNA, 22 bp, Artificial sequence
  Primer
ggtggactcatatgagtccacc

SEQ ID NO: 11173 - DNA, 22 bp, Artificial sequence
  Primer
ggctgactcatatgagtcagcc

SEQ ID NO: 11174 - DNA, 22 bp, Artificial sequence
  Primer
gcccgactcatatgagtcgggc

SEQ ID NO: 11175 - DNA, 22 bp, Artificial sequence
  Primer
acccgactcatatgagtcgggt

SEQ ID NO: 11176 - DNA, 22 bp, Artificial sequence
  Primer
gaccgactcatatgagtcggtc

SEQ ID NO: 11177 - DNA, 22 bp, Artificial sequence
  Primer
gcacgactcatatgagtcgtgc

SEQ ID NO: 11178 - DNA, 22 bp, Artificial sequence
  Primer
gccagactcatatgagtctggc

SEQ ID NO: 11179 - DNA, 22 bp, Artificial sequence
  Primer
tcccgactcatatgagtcggga

SEQ ID NO: 11180 - DNA, 22 bp, Artificial sequence
  Primer
gtccgactcatatgagtcggac

SEQ ID NO: 11181 - DNA, 22 bp, Artificial sequence
  Primer
gcctgactcatatgagtcaggc

SEQ ID NO: 11182 - DNA, 22 bp, Artificial sequence
  Primer
gggcgactcatatgagtcgccc

SEQ ID NO: 11183 - DNA, 22 bp, Artificial sequence
  Primer
aggcgactcatatgagtcgcct

SEQ ID NO: 11184 - DNA, 22 bp, Artificial sequence
  Primer
gagcgactcatatgagtcgctc

SEQ ID NO: 11185 - DNA, 22 bp, Artificial sequence
  Primer
ggacgactcatatgagtcgtcc

SEQ ID NO: 11186 - DNA, 22 bp, Artificial sequence
  Primer
gggagactcatatgagtctccc

SEQ ID NO: 11187 - DNA, 22 bp, Artificial sequence
  Primer
tggcgactcatatgagtcgcca

SEQ ID NO: 11188 - DNA, 22 bp, Artificial sequence
  Primer
gtgcgactcatatgagtcgcac

SEQ ID NO: 11189 - DNA, 22 bp, Artificial sequence
  Primer
gggtgactcatatgagtcaccc

SEQ ID NO: 11190 - DNA, 22 bp, Artificial sequence
  Primer
acgggactcatatgagtcccgt

SEQ ID NO: 11191 - DNA, 22 bp, Artificial sequence
  Primer
cagggactcatatgagtccctg

SEQ ID NO: 11192 - DNA, 22 bp, Artificial sequence
  Primer
ccaggactcatatgagtcctgg

SEQ ID NO: 11193 - DNA, 22 bp, Artificial sequence
  Primer
ccgagactcatatgagtctcgg

SEQ ID NO: 11194 - DNA, 22 bp, Artificial sequence
  Primer
tcgggactcatatgagtcccga

SEQ ID NO: 11195 - DNA, 22 bp, Artificial sequence
  Primer
ctgggactcatatgagtcccag

SEQ ID NO: 11196 - DNA, 22 bp, Artificial sequence
  Primer
cctggactcatatgagtccagg

SEQ ID NO: 11197 - DNA, 22 bp, Artificial sequence
  Primer
ccgtgactcatatgagtcacgg

SEQ ID NO: 11198 - DNA, 22 bp, Artificial sequence
  Primer
cggcgactcatatgagtcgccg

SEQ ID NO: 11199 - DNA, 22 bp, Artificial sequence
  Primer
cagcgactcatatgagtcgctg

SEQ ID NO: 11200 - DNA, 22 bp, Artificial sequence
  Primer
cgacgactcatatgagtcgtcg

SEQ ID NO: 11201 - DNA, 22 bp, Artificial sequence
  Primer
cggagactcatatgagtctccg

SEQ ID NO: 11202 - DNA, 22 bp, Artificial sequence
  Primer
ctgcgactcatatgagtcgcag

SEQ ID NO: 11203 - DNA, 22 bp, Artificial sequence
  Primer
cggtgactcatatgagtcaccg

SEQ ID NO: 11204 - DNA, 22 bp, Artificial sequence
  Primer
cacggactcatatgagtccgtg

SEQ ID NO: 11205 - DNA, 22 bp, Artificial sequence
  Primer
cccagactcatatgagtctggg

SEQ ID NO: 11206 - DNA, 22 bp, Artificial sequence
  Primer
ctcggactcatatgagtccgag

SEQ ID NO: 11207 - DNA, 22 bp, Artificial sequence
  Primer
ccctgactcatatgagtcaggg

SEQ ID NO: 11208 - DNA, 22 bp, Artificial sequence
  Primer
ccacgactcatatgagtcgtgg

SEQ ID NO: 11209 - DNA, 22 bp, Artificial sequence
  Primer
agccgactcatatgagtcggct

SEQ ID NO: 11210 - DNA, 22 bp, Artificial sequence
  Primer
tgccgactcatatgagtcggca

SEQ ID NO: 11211 - DNA, 22 bp, Artificial sequence
  Primer
gcgagactcatatgagtctcgc

SEQ ID NO: 11212 - DNA, 22 bp, Artificial sequence
  Primer
gcgtgactcatatgagtcacgc

SEQ ID NO: 11213 - DNA, 22 bp, Artificial sequence
  Primer
gcaggactcatatgagtcctgc

SEQ ID NO: 11214 - DNA, 22 bp, Artificial sequence
  Primer
gctggactcatatgagtccagc

SEQ ID NO: 11215 - DNA, 22 bp, Artificial sequence
  Primer
cgaggactcatatgagtcctcg

SEQ ID NO: 11216 - DNA, 22 bp, Artificial sequence
  Primer
cgtggactcatatgagtccacg

SEQ ID NO: 11217 - DNA, 22 bp, Artificial sequence
  Primer
caccgactcatatgagtcggtg

SEQ ID NO: 11218 - DNA, 22 bp, Artificial sequence
  Primer
ctccgactcatatgagtcggag

SEQ ID NO: 11219 - DNA, 22 bp, Artificial sequence
  Primer
gcgggactcatatgagtcccgc

SEQ ID NO: 11220 - DNA, 22 bp, Artificial sequence
  Primer
gagggactcatatgagtccctc

SEQ ID NO: 11221 - DNA, 22 bp, Artificial sequence
  Primer
gtgggactcatatgagtcccac

SEQ ID NO: 11222 - DNA, 22 bp, Artificial sequence
  Primer
  misc_feature (1)..(4): n is a, c, g, or t
  misc_feature (19)..(22): n is a, c, g, or t
nnnngactcttaagagtcnnnn

SEQ ID NO: 11223 - DNA, 22 bp, Artificial sequence
  Primer
ggcggactcttaagagtccgcc

SEQ ID NO: 11224 - DNA, 22 bp, Artificial sequence
  Primer
agcggactcttaagagtccgct

SEQ ID NO: 11225 - DNA, 22 bp, Artificial sequence
  Primer
gacggactcttaagagtccgtc

SEQ ID NO: 11226 - DNA, 22 bp, Artificial sequence
  Primer
ggaggactcttaagagtcctcc

SEQ ID NO: 11227 - DNA, 22 bp, Artificial sequence
  Primer
ggcagactcttaagagtctgcc

SEQ ID NO: 11228 - DNA, 22 bp, Artificial sequence
  Primer
tgcggactcttaagagtccgca

SEQ ID NO: 11229 - DNA, 22 bp, Artificial sequence
  Primer
gtcggactcttaagagtccgac

SEQ ID NO: 11230 - DNA, 22 bp, Artificial sequence
  Primer
ggtggactcttaagagtccacc

SEQ ID NO: 11231 - DNA, 22 bp, Artificial sequence
  Primer
ggctgactcttaagagtcagcc

SEQ ID NO: 11232 - DNA, 22 bp, Artificial sequence
  Primer
gcccgactcttaagagtcgggc

SEQ ID NO: 11233 - DNA, 22 bp, Artificial sequence
  Primer
acccgactcttaagagtcgggt

SEQ ID NO: 11234 - DNA, 22 bp, Artificial sequence
  Primer
gaccgactcttaagagtcggtc

SEQ ID NO: 11235 - DNA, 22 bp, Artificial sequence
  Primer
gcacgactcttaagagtcgtgc

SEQ ID NO: 11236 - DNA, 22 bp, Artificial sequence
  Primer
gccagactcttaagagtctggc

SEQ ID NO: 11237 - DNA, 22 bp, Artificial sequence
  Primer
tcccgactcttaagagtcggga

SEQ ID NO: 11238 - DNA, 22 bp, Artificial sequence
  Primer
gtccgactcttaagagtcggac

SEQ ID NO: 11239 - DNA, 22 bp, Artificial sequence
  Primer
gcctgactcttaagagtcaggc

SEQ ID NO: 11240 - DNA, 22 bp, Artificial sequence
  Primer
gggcgactcttaagagtcgccc

SEQ ID NO: 11241 - DNA, 22 bp, Artificial sequence
  Primer
aggcgactcttaagagtcgcct

SEQ ID NO: 11242 - DNA, 22 bp, Artificial sequence
  Primer
gagcgactcttaagagtcgctc

SEQ ID NO: 11243 - DNA, 22 bp, Artificial sequence
  Primer
ggacgactcttaagagtcgtcc

SEQ ID NO: 11244 - DNA, 22 bp, Artificial sequence
  Primer
gggagactcttaagagtctccc

SEQ ID NO: 11245 - DNA, 22 bp, Artificial sequence
  Primer
tggcgactcttaagagtcgcca

SEQ ID NO: 11246 - DNA, 22 bp, Artificial sequence
  Primer
gtgcgactcttaagagtcgcac

SEQ ID NO: 11247 - DNA, 22 bp, Artificial sequence
  Primer
gggtgactcttaagagtcaccc

SEQ ID NO: 11248 - DNA, 22 bp, Artificial sequence
  Primer
acgggactcttaagagtcccgt

SEQ ID NO: 11249 - DNA, 22 bp, Artificial sequence
  Primer
cagggactcttaagagtccctg

SEQ ID NO: 11250 - DNA, 22 bp, Artificial sequence
  Primer
ccaggactcttaagagtcctgg

SEQ ID NO: 11251 - DNA, 22 bp, Artificial sequence
  Primer
ccgagactcttaagagtctcgg

SEQ ID NO: 11252 - DNA, 22 bp, Artificial sequence
  Primer
tcgggactcttaagagtcccga

SEQ ID NO: 11253 - DNA, 22 bp, Artificial sequence
  Primer
ctgggactcttaagagtcccag

SEQ ID NO: 11254 - DNA, 22 bp, Artificial sequence
  Primer
cctggactcttaagagtccagg

SEQ ID NO: 11255 - DNA, 22 bp, Artificial sequence
  Primer
ccgtgactcttaagagtcacgg

SEQ ID NO: 11256 - DNA, 22 bp, Artificial sequence
  Primer
cggcgactcttaagagtcgccg

SEQ ID NO: 11257 - DNA, 22 bp, Artificial sequence
  Primer
cagcgactcttaagagtcgctg

SEQ ID NO: 11258 - DNA, 22 bp, Artificial sequence
  Primer
cgacgactcttaagagtcgtcg

SEQ ID NO: 11259 - DNA, 22 bp, Artificial sequence
  Primer
cggagactcttaagagtctccg

SEQ ID NO: 11260 - DNA, 22 bp, Artificial sequence
  Primer
ctgcgactcttaagagtcgcag

SEQ ID NO: 11261 - DNA, 22 bp, Artificial sequence
  Primer
cggtgactcttaagagtcaccg

SEQ ID NO: 11262 - DNA, 22 bp, Artificial sequence
  Primer
cacggactcttaagagtccgtg

SEQ ID NO: 11263 - DNA, 22 bp, Artificial sequence
  Primer
cccagactcttaagagtctggg

SEQ ID NO: 11264 - DNA, 22 bp, Artificial sequence
  Primer
ctcggactcttaagagtccgag

SEQ ID NO: 11265 - DNA, 22 bp, Artificial sequence
  Primer
ccctgactcttaagagtcaggg

SEQ ID NO: 11266 - DNA, 22 bp, Artificial sequence
  Primer
ccacgactcttaagagtcgtgg

SEQ ID NO: 11267 - DNA, 22 bp, Artificial sequence
  Primer
agccgactcttaagagtcggct

SEQ ID NO: 11268 - DNA, 22 bp, Artificial sequence
  Primer
tgccgactcttaagagtcggca

SEQ ID NO: 11269 - DNA, 22 bp, Artificial sequence
  Primer
gcgagactcttaagagtctcgc

SEQ ID NO: 11270 - DNA, 22 bp, Artificial sequence
  Primer
gcgtgactcttaagagtcacgc

SEQ ID NO: 11271 - DNA, 22 bp, Artificial sequence
  Primer
gcaggactcttaagagtcctgc

SEQ ID NO: 11272 - DNA, 22 bp, Artificial sequence
  Primer
gctggactcttaagagtccagc

SEQ ID NO: 11273 - DNA, 22 bp, Artificial sequence
  Primer
cgaggactcttaagagtcctcg

SEQ ID NO: 11274 - DNA, 22 bp, Artificial sequence
  Primer
cgtggactcttaagagtccacg

SEQ ID NO: 11275 - DNA, 22 bp, Artificial sequence
  Primer
caccgactcttaagagtcggtg

SEQ ID NO: 11276 - DNA, 22 bp, Artificial sequence
  Primer
ctccgactcttaagagtcggag

SEQ ID NO: 11277 - DNA, 22 bp, Artificial sequence
  Primer
gcgggactcttaagagtcccgc

SEQ ID NO: 11278 - DNA, 22 bp, Artificial sequence
  Primer
gagggactcttaagagtccctc

SEQ ID NO: 11279 - DNA, 22 bp, Artificial sequence
  Primer
gtgggactcttaagagtcccac

SEQ ID NO: 11280 - DNA, 21 bp, Artificial sequence
  Primer
  misc_feature (1)..(3): n is a, c, g, or t
  misc_feature (18)..(21): n is a, c, g, or t
nnngactccgcggagtcnnnn

SEQ ID NO: 11281 - DNA, 21 bp, Artificial sequence
  Primer
gcggactccgcggagtccgcc

SEQ ID NO: 11282 - DNA, 21 bp, Artificial sequence
  Primer
gcggactccgcggagtccgct

SEQ ID NO: 11283 - DNA, 21 bp, Artificial sequence
  Primer
acggactccgcggagtccgtc

SEQ ID NO: 11284 - DNA, 21 bp, Artificial sequence
  Primer
gaggactccgcggagtcctcc

SEQ ID NO: 11285 - DNA, 21 bp, Artificial sequence
  Primer
gcagactccgcggagtctgcc

SEQ ID NO: 11286 - DNA, 21 bp, Artificial sequence
  Primer
gcggactccgcggagtccgca

SEQ ID NO: 11287 - DNA, 21 bp, Artificial sequence
  Primer
tcggactccgcggagtccgac

SEQ ID NO: 11288 - DNA, 21 bp, Artificial sequence
  Primer
gtggactccgcggagtccacc

SEQ ID NO: 11289 - DNA, 21 bp, Artificial sequence
  Primer
gctgactccgcggagtcagcc

SEQ ID NO: 11290 - DNA, 21 bp, Artificial sequence
  Primer
cccgactccgcggagtcgggc

SEQ ID NO: 11291 - DNA, 21 bp, Artificial sequence
  Primer
cccgactccgcggagtcgggt

SEQ ID NO: 11292 - DNA, 21 bp, Artificial sequence
  Primer
accgactccgcggagtcggtc

SEQ ID NO: 11293 - DNA, 21 bp, Artificial sequence
  Primer
cacgactccgcggagtcgtgc

SEQ ID NO: 11294 - DNA, 21 bp, Artificial sequence
  Primer
ccagactccgcggagtctggc

SEQ ID NO: 11295 - DNA, 21 bp, Artificial sequence
  Primer
cccgactccgcggagtcggga

SEQ ID NO: 11296 - DNA, 21 bp, Artificial sequence
  Primer
tccgactccgcggagtcggac

SEQ ID NO: 11297 - DNA, 21 bp, Artificial sequence
  Primer
cctgactccgcggagtcaggc

SEQ ID NO: 11298 - DNA, 21 bp, Artificial sequence
  Primer
ggcgactccgcggagtcgccc

SEQ ID NO: 11299 - DNA, 21 bp, Artificial sequence
  Primer
ggcgactccgcggagtcgcct

SEQ ID NO: 11300 - DNA, 21 bp, Artificial sequence
  Primer
agcgactccgcggagtcgctc

SEQ ID NO: 11301 - DNA, 21 bp, Artificial sequence
  Primer
gacgactccgcggagtcgtcc

SEQ ID NO: 11302 - DNA, 21 bp, Artificial sequence
  Primer
ggagactccgcggagtctccc

SEQ ID NO: 11303 - DNA, 21 bp, Artificial sequence
  Primer
ggcgactccgcggagtcgcca

SEQ ID NO: 11304 - DNA, 21 bp, Artificial sequence
  Primer
tgcgactccgcggagtcgcac

SEQ ID NO: 11305 - DNA, 21 bp, Artificial sequence
  Primer
ggtgactccgcggagtcaccc

SEQ ID NO: 11306 - DNA, 21 bp, Artificial sequence
  Primer
cgggactccgcggagtcccgt

SEQ ID NO: 11307 - DNA, 21 bp, Artificial sequence
  Primer
agggactccgcggagtccctg

SEQ ID NO: 11308 - DNA, 21 bp, Artificial sequence
  Primer
caggactccgcggagtcctgg

SEQ ID NO: 11309 - DNA, 21 bp, Artificial sequence
  Primer
cgagactccgcggagtctcgg

SEQ ID NO: 11310 - DNA, 21 bp, Artificial sequence
  Primer
cgggactccgcggagtcccga

SEQ ID NO: 11311 - DNA, 21 bp, Artificial sequence
  Primer
tgggactccgcggagtcccag

SEQ ID NO: 11312 - DNA, 21 bp, Artificial sequence
  Primer
ctggactccgcggagtccagg

SEQ ID NO: 11313 - DNA, 21 bp, Artificial sequence
  Primer
cgtgactccgcggagtcacgg

SEQ ID NO: 11314 - DNA, 21 bp, Artificial sequence
  Primer
ggcgactccgcggagtcgccg

SEQ ID NO: 11315 - DNA, 21 bp, Artificial sequence
  Primer
agcgactccgcggagtcgctg

SEQ ID NO: 11316 - DNA, 21 bp, Artificial sequence
  Primer
gacgactccgcggagtcgtcg

SEQ ID NO: 11317 - DNA, 21 bp, Artificial sequence
  Primer
ggagactccgcggagtctccg

SEQ ID NO: 11318 - DNA, 21 bp, Artificial sequence
  Primer
tgcgactccgcggagtcgcag

SEQ ID NO: 11319 - DNA, 21 bp, Artificial sequence
  Primer
ggtgactccgcggagtcaccg

SEQ ID NO: 11320 - DNA, 21 bp, Artificial sequence
  Primer
acggactccgcggagtccgtg

SEQ ID NO: 11321 - DNA, 21 bp, Artificial sequence
  Primer
ccagactccgcggagtctggg

SEQ ID NO: 11322 - DNA, 21 bp, Artificial sequence
  Primer
tcggactccgcggagtccgag

SEQ ID NO: 11323 - DNA, 21 bp, Artificial sequence
  Primer
cctgactccgcggagtcaggg

SEQ ID NO: 11324 - DNA, 21 bp, Artificial sequence
  Primer
cacgactccgcggagtcgtgg

SEQ ID NO: 11325 - DNA, 21 bp, Artificial sequence
  Primer
gccgactccgcggagtcggct

SEQ ID NO: 11326 - DNA, 21 bp, Artificial sequence
  Primer
gccgactccgcggagtcggca

SEQ ID NO: 11327 - DNA, 21 bp, Artificial sequence
  Primer
cgagactccgcggagtctcgc

SEQ ID NO: 11328 - DNA, 21 bp, Artificial sequence
  Primer
cgtgactccgcggagtcacgc

SEQ ID NO: 11329 - DNA, 21 bp, Artificial sequence
  Primer
caggactccgcggagtcctgc

SEQ ID NO: 11330 - DNA, 21 bp, Artificial sequence
  Primer
ctggactccgcggagtccagc

SEQ ID NO: 11331 - DNA, 21 bp, Artificial sequence
  Primer
gaggactccgcggagtcctcg

SEQ ID NO: 11332 - DNA, 21 bp, Artificial sequence
  Primer
gtggactccgcggagtccacg

SEQ ID NO: 11333 - DNA, 21 bp, Artificial sequence
  Primer
accgactccgcggagtcggtg

SEQ ID NO: 11334 - DNA, 21 bp, Artificial sequence
  Primer
tccgactccgcggagtcggag

SEQ ID NO: 11335 - DNA, 21 bp, Artificial sequence
  Primer
cgggactccgcggagtcccgc

SEQ ID NO: 11336 - DNA, 21 bp, Artificial sequence
  Primer
agggactccgcggagtccctc

SEQ ID NO: 11337 - DNA, 21 bp, Artificial sequence
  Primer
tgggactccgcggagtcccac

SEQ ID NO: 11338 - DNA, 21 bp, Artificial sequence
  Primer
  misc_feature (1)..(3): n is a, c, g, or t
  misc_feature (18)..(21): n is a, c, g, or t
nnngactctgcagagtcnnnn

SEQ ID NO: 11339 - DNA, 21 bp, Artificial sequence
  Primer
gcggactctgcagagtccgcc

SEQ ID NO: 11340 - DNA, 21 bp, Artificial sequence
  Primer
gcggactctgcagagtccgct

SEQ ID NO: 11341 - DNA, 21 bp, Artificial sequence
  Primer
acggactctgcagagtccgtc

SEQ ID NO: 11342 - DNA, 21 bp, Artificial sequence
  Primer
gaggactctgcagagtcctcc

SEQ ID NO: 11343 - DNA, 21 bp, Artificial sequence
  Primer
gcagactctgcagagtctgcc

SEQ ID NO: 11344 - DNA, 21 bp, Artificial sequence
  Primer
gcggactctgcagagtccgca

SEQ ID NO: 11345 - DNA, 21 bp, Artificial sequence
  Primer
tcggactctgcagagtccgac

SEQ ID NO: 11346 - DNA, 21 bp, Artificial sequence
  Primer
gtggactctgcagagtccacc

SEQ ID NO: 11347 - DNA, 21 bp, Artificial sequence
  Primer
gctgactctgcagagtcagcc

SEQ ID NO: 11348 - DNA, 21 bp, Artificial sequence
  Primer
cccgactctgcagagtcgggc

SEQ ID NO: 11349 - DNA, 21 bp, Artificial sequence
  Primer
cccgactctgcagagtcgggt

SEQ ID NO: 11350 - DNA, 21 bp, Artificial sequence
  Primer
accgactctgcagagtcggtc

SEQ ID NO: 11351 - DNA, 21 bp, Artificial sequence
  Primer
cacgactctgcagagtcgtgc

SEQ ID NO: 11352 - DNA, 21 bp, Artificial sequence
  Primer
ccagactctgcagagtctggc

SEQ ID NO: 11353 - DNA, 21 bp, Artificial sequence
  Primer
cccgactctgcagagtcggga

SEQ ID NO: 11354 - DNA, 21 bp, Artificial sequence
  Primer
tccgactctgcagagtcggac

SEQ ID NO: 11355 - DNA, 21 bp, Artificial sequence
  Primer
cctgactctgcagagtcaggc

SEQ ID NO: 11356 - DNA, 21 bp, Artificial sequence
  Primer
ggcgactctgcagagtcgccc

SEQ ID NO: 11357 - DNA, 21 bp, Artificial sequence
  Primer
ggcgactctgcagagtcgcct

SEQ ID NO: 11358 - DNA, 21 bp, Artificial sequence
  Primer
agcgactctgcagagtcgctc

SEQ ID NO: 11359 - DNA, 21 bp, Artificial sequence
  Primer
gacgactctgcagagtcgtcc

SEQ ID NO: 11360 - DNA, 21 bp, Artificial sequence
  Primer
ggagactctgcagagtctccc

SEQ ID NO: 11361 - DNA, 21 bp, Artificial sequence
  Primer
ggcgactctgcagagtcgcca

SEQ ID NO: 11362 - DNA, 21 bp, Artificial sequence
  Primer
tgcgactctgcagagtcgcac

SEQ ID NO: 11363 - DNA, 21 bp, Artificial sequence
  Primer
ggtgactctgcagagtcaccc

SEQ ID NO: 11364 - DNA, 21 bp, Artificial sequence
  Primer
cgggactctgcagagtcccgt

SEQ ID NO: 11365 - DNA, 21 bp, Artificial sequence
  Primer
agggactctgcagagtccctg

SEQ ID NO: 11366 - DNA, 21 bp, Artificial sequence
  Primer
caggactctgcagagtcctgg

SEQ ID NO: 11367 - DNA, 21 bp, Artificial sequence
  Primer
cgagactctgcagagtctcgg

SEQ ID NO: 11368 - DNA, 21 bp, Artificial sequence
  Primer
cgggactctgcagagtcccga

SEQ ID NO: 11369 - DNA, 21 bp, Artificial sequence
  Primer
tgggactctgcagagtcccag

SEQ ID NO: 11370 - DNA, 21 bp, Artificial sequence
  Primer
ctggactctgcagagtccagg

SEQ ID NO: 11371 - DNA, 21 bp, Artificial sequence
  Primer
cgtgactctgcagagtcacgg

SEQ ID NO: 11372 - DNA, 21 bp, Artificial sequence
  Primer
ggcgactctgcagagtcgccg

SEQ ID NO: 11373 - DNA, 21 bp, Artificial sequence
  Primer
agcgactctgcagagtcgctg

SEQ ID NO: 11374 - DNA, 21 bp, Artificial sequence
  Primer
gacgactctgcagagtcgtcg

SEQ ID NO: 11375 - DNA, 21 bp, Artificial sequence
  Primer
ggagactctgcagagtctccg

SEQ ID NO: 11376 - DNA, 21 bp, Artificial sequence
  Primer
tgcgactctgcagagtcgcag

SEQ ID NO: 11377 - DNA, 21 bp, Artificial sequence
  Primer
ggtgactctgcagagtcaccg

SEQ ID NO: 11378 - DNA, 21 bp, Artificial sequence
  Primer
acggactctgcagagtccgtg

SEQ ID NO: 11379 - DNA, 21 bp, Artificial sequence
  Primer
ccagactctgcagagtctggg

SEQ ID NO: 11380 - DNA, 21 bp, Artificial sequence
  Primer
tcggactctgcagagtccgag

SEQ ID NO: 11381 - DNA, 21 bp, Artificial sequence
  Primer
cctgactctgcagagtcaggg

SEQ ID NO: 11382 - DNA, 21 bp, Artificial sequence
  Primer
cacgactctgcagagtcgtgg

SEQ ID NO: 11383 - DNA, 21 bp, Artificial sequence
  Primer
gccgactctgcagagtcggct

SEQ ID NO: 11384 - DNA, 21 bp, Artificial sequence
  Primer
gccgactctgcagagtcggca

SEQ ID NO: 11385 - DNA, 21 bp, Artificial sequence
  Primer
cgagactctgcagagtctcgc

SEQ ID NO: 11386 - DNA, 21 bp, Artificial sequence
  Primer
cgtgactctgcagagtcacgc

SEQ ID NO: 11387 - DNA, 21 bp, Artificial sequence
  Primer
caggactctgcagagtcctgc

SEQ ID NO: 11388 - DNA, 21 bp, Artificial sequence
  Primer
ctggactctgcagagtccagc

SEQ ID NO: 11389 - DNA, 21 bp, Artificial sequence
  Primer
gaggactctgcagagtcctcg

SEQ ID NO: 11390 - DNA, 21 bp, Artificial sequence
  Primer
gtggactctgcagagtccacg

SEQ ID NO: 11391 - DNA, 21 bp, Artificial sequence
  Primer
accgactctgcagagtcggtg

SEQ ID NO: 11392 - DNA, 21 bp, Artificial sequence
  Primer
tccgactctgcagagtcggag

SEQ ID NO: 11393 - DNA, 21 bp, Artificial sequence
  Primer
cgggactctgcagagtcccgc

SEQ ID NO: 11394 - DNA, 21 bp, Artificial sequence
  Primer
agggactctgcagagtccctc

SEQ ID NO: 11395 - DNA, 21 bp, Artificial sequence
  Primer
tgggactctgcagagtcccac

SEQ ID NO: 11396 - DNA, 21 bp, Artificial sequence
  Primer
  misc_feature (1)..(3): n is a, c, g, or t
  misc_feature (18)..(21): n is a, c, g, or t
nnngactcgcgcgagtcnnnn

SEQ ID NO: 11397 - DNA, 21 bp, Artificial sequence
  Primer
gcggactcgcgcgagtccgcc

SEQ ID NO: 11398 - DNA, 21 bp, Artificial sequence
  Primer
gcggactcgcgcgagtccgct

SEQ ID NO: 11399 - DNA, 21 bp, Artificial sequence
  Primer
acggactcgcgcgagtccgtc

SEQ ID NO: 11400 - DNA, 21 bp, Artificial sequence
  Primer
gaggactcgcgcgagtcctcc

SEQ ID NO: 11401 - DNA, 21 bp, Artificial sequence
  Primer
gcagactcgcgcgagtctgcc

SEQ ID NO: 11402 - DNA, 21 bp, Artificial sequence
  Primer
gcggactcgcgcgagtccgca

SEQ ID NO: 11403 - DNA, 21 bp, Artificial sequence
  Primer
tcggactcgcgcgagtccgac

SEQ ID NO: 11404 - DNA, 21 bp, Artificial sequence
  Primer
gtggactcgcgcgagtccacc

SEQ ID NO: 11405 - DNA, 21 bp, Artificial sequence
  Primer
gctgactcgcgcgagtcagcc

SEQ ID NO: 11406 - DNA, 21 bp, Artificial sequence
  Primer
cccgactcgcgcgagtcgggc

SEQ ID NO: 11407 - DNA, 21 bp, Artificial sequence
  Primer
cccgactcgcgcgagtcgggt

SEQ ID NO: 11408 - DNA, 21 bp, Artificial sequence
  Primer
accgactcgcgcgagtcggtc

SEQ ID NO: 11409 - DNA, 21 bp, Artificial sequence
  Primer
cacgactcgcgcgagtcgtgc

SEQ ID NO: 11410 - DNA, 21 bp, Artificial sequence
  Primer
ccagactcgcgcgagtctggc

SEQ ID NO: 11411 - DNA, 21 bp, Artificial sequence
  Primer
cccgactcgcgcgagtcggga

SEQ ID NO: 11412 - DNA, 21 bp, Artificial sequence
  Primer
tccgactcgcgcgagtcggac

SEQ ID NO: 11413 - DNA, 21 bp, Artificial sequence
  Primer
cctgactcgcgcgagtcaggc

SEQ ID NO: 11414 - DNA, 21 bp, Artificial sequence
  Primer
ggcgactcgcgcgagtcgccc

SEQ ID NO: 11415 - DNA, 21 bp, Artificial sequence
  Primer
ggcgactcgcgcgagtcgcct

SEQ ID NO: 11416 - DNA, 21 bp, Artificial sequence
  Primer
agcgactcgcgcgagtcgctc

SEQ ID NO: 11417 - DNA, 21 bp, Artificial sequence
  Primer
gacgactcgcgcgagtcgtcc

SEQ ID NO: 11418 - DNA, 21 bp, Artificial sequence
  Primer
ggagactcgcgcgagtctccc

SEQ ID NO: 11419 - DNA, 21 bp, Artificial sequence
  Primer
ggcgactcgcgcgagtcgcca

SEQ ID NO: 11420 - DNA, 21 bp, Artificial sequence
  Primer
tgcgactcgcgcgagtcgcac

SEQ ID NO: 11421 - DNA, 21 bp, Artificial sequence
  Primer
ggtgactcgcgcgagtcaccc

SEQ ID NO: 11422 - DNA, 21 bp, Artificial sequence
  Primer
cgggactcgcgcgagtcccgt

SEQ ID NO: 11423 - DNA, 21 bp, Artificial sequence
  Primer
agggactcgcgcgagtccctg

SEQ ID NO: 11424 - DNA, 21 bp, Artificial sequence
  Primer
caggactcgcgcgagtcctgg

SEQ ID NO: 11425 - DNA, 21 bp, Artificial sequence
  Primer
cgagactcgcgcgagtctcgg

SEQ ID NO: 11426 - DNA, 21 bp, Artificial sequence
  Primer
cgggactcgcgcgagtcccga

SEQ ID NO: 11427 - DNA, 21 bp, Artificial sequence
  Primer
tgggactcgcgcgagtcccag

SEQ ID NO: 11428 - DNA, 21 bp, Artificial sequence
  Primer
ctggactcgcgcgagtccagg

SEQ ID NO: 11429 - DNA, 21 bp, Artificial sequence
  Primer
cgtgactcgcgcgagtcacgg

SEQ ID NO: 11430 - DNA, 21 bp, Artificial sequence
  Primer
ggcgactcgcgcgagtcgccg

SEQ ID NO: 11431 - DNA, 21 bp, Artificial sequence
  Primer
agcgactcgcgcgagtcgctg

SEQ ID NO: 11432 - DNA, 21 bp, Artificial sequence
  Primer
gacgactcgcgcgagtcgtcg

SEQ ID NO: 11433 - DNA, 21 bp, Artificial sequence
  Primer
ggagactcgcgcgagtctccg

SEQ ID NO: 11434 - DNA, 21 bp, Artificial sequence
  Primer
tgcgactcgcgcgagtcgcag

SEQ ID NO: 11435 - DNA, 21 bp, Artificial sequence
  Primer
ggtgactcgcgcgagtcaccg

SEQ ID NO: 11436 - DNA, 21 bp, Artificial sequence
  Primer
acggactcgcgcgagtccgtg

SEQ ID NO: 11437 - DNA, 21 bp, Artificial sequence
  Primer
ccagactcgcgcgagtctggg

SEQ ID NO: 11438 - DNA, 21 bp, Artificial sequence
  Primer
tcggactcgcgcgagtccgag

SEQ ID NO: 11439 - DNA, 21 bp, Artificial sequence
  Primer
cctgactcgcgcgagtcaggg

SEQ ID NO: 11440 - DNA, 21 bp, Artificial sequence
  Primer
cacgactcgcgcgagtcgtgg

SEQ ID NO: 11441 - DNA, 21 bp, Artificial sequence
  Primer
gccgactcgcgcgagtcggct

SEQ ID NO: 11442 - DNA, 21 bp, Artificial sequence
  Primer
gccgactcgcgcgagtcggca

SEQ ID NO: 11443 - DNA, 21 bp, Artificial sequence
  Primer
cgagactcgcgcgagtctcgc

SEQ ID NO: 11444 - DNA, 21 bp, Artificial sequence
  Primer
cgtgactcgcgcgagtcacgc

SEQ ID NO: 11445 - DNA, 21 bp, Artificial sequence
  Primer
caggactcgcgcgagtcctgc

SEQ ID NO: 11446 - DNA, 21 bp, Artificial sequence
  Primer
ctggactcgcgcgagtccagc

SEQ ID NO: 11447 - DNA, 21 bp, Artificial sequence
  Primer
gaggactcgcgcgagtcctcg

SEQ ID NO: 11448 - DNA, 21 bp, Artificial sequence
  Primer
gtggactcgcgcgagtccacg

SEQ ID NO: 11449 - DNA, 21 bp, Artificial sequence
  Primer
accgactcgcgcgagtcggtg

SEQ ID NO: 11450 - DNA, 21 bp, Artificial sequence
  Primer
tccgactcgcgcgagtcggag

SEQ ID NO: 11451 - DNA, 21 bp, Artificial sequence
  Primer
cgggactcgcgcgagtcccgc

SEQ ID NO: 11452 - DNA, 21 bp, Artificial sequence
  Primer
agggactcgcgcgagtccctc

SEQ ID NO: 11453 - DNA, 21 bp, Artificial sequence
  Primer
tgggactcgcgcgagtcccac

SEQ ID NO: 11454 - DNA, 21 bp, Artificial sequence
  Primer
  misc_feature (1)..(3): n is a, c, g, or t
  misc_feature (18)..(21): n is a, c, g, or t
nnngactcacgtgagtcnnnn

SEQ ID NO: 11455 - DNA, 21 bp, Artificial sequence
  Primer
gcggactcacgtgagtccgcc

SEQ ID NO: 11456 - DNA, 21 bp, Artificial sequence
  Primer
gcggactcacgtgagtccgct

SEQ ID NO: 11457 - DNA, 21 bp, Artificial sequence
  Primer
acggactcacgtgagtccgtc

SEQ ID NO: 11458 - DNA, 21 bp, Artificial sequence
  Primer
gaggactcacgtgagtcctcc

SEQ ID NO: 11459 - DNA, 21 bp, Artificial sequence
  Primer
gcagactcacgtgagtctgcc

SEQ ID NO: 11460 - DNA, 21 bp, Artificial sequence
  Primer
gcggactcacgtgagtccgca

SEQ ID NO: 11461 - DNA, 21 bp, Artificial sequence
  Primer
tcggactcacgtgagtccgac

SEQ ID NO: 11462 - DNA, 21 bp, Artificial sequence
  Primer
gtggactcacgtgagtccacc

SEQ ID NO: 11463 - DNA, 21 bp, Artificial sequence
  Primer
gctgactcacgtgagtcagcc

SEQ ID NO: 11464 - DNA, 21 bp, Artificial sequence
  Primer
cccgactcacgtgagtcgggc

SEQ ID NO: 11465 - DNA, 21 bp, Artificial sequence
  Primer
cccgactcacgtgagtcgggt

SEQ ID NO: 11466 - DNA, 21 bp, Artificial sequence
  Primer
accgactcacgtgagtcggtc

SEQ ID NO: 11467 - DNA, 21 bp, Artificial sequence
  Primer
cacgactcacgtgagtcgtgc

SEQ ID NO: 11468 - DNA, 21 bp, Artificial sequence
  Primer
ccagactcacgtgagtctggc

SEQ ID NO: 11469 - DNA, 21 bp, Artificial sequence
  Primer
cccgactcacgtgagtcggga

SEQ ID NO: 11470 - DNA, 21 bp, Artificial sequence
  Primer
tccgactcacgtgagtcggac

SEQ ID NO: 11471 - DNA, 21 bp, Artificial sequence
  Primer
cctgactcacgtgagtcaggc

SEQ ID NO: 11472 - DNA, 21 bp, Artificial sequence
  Primer
ggcgactcacgtgagtcgccc

SEQ ID NO: 11473 - DNA, 21 bp, Artificial sequence
  Primer
ggcgactcacgtgagtcgcct

SEQ ID NO: 11474 - DNA, 21 bp, Artificial sequence
  Primer
agcgactcacgtgagtcgctc

SEQ ID NO: 11475 - DNA, 21 bp, Artificial sequence
  Primer
gacgactcacgtgagtcgtcc

SEQ ID NO: 11476 - DNA, 21 bp, Artificial sequence
  Primer
ggagactcacgtgagtctccc

SEQ ID NO: 11477 - DNA, 21 bp, Artificial sequence
  Primer
ggcgactcacgtgagtcgcca

SEQ ID NO: 11478 - DNA, 21 bp, Artificial sequence
  Primer
tgcgactcacgtgagtcgcac

SEQ ID NO: 11479 - DNA, 21 bp, Artificial sequence
  Primer
ggtgactcacgtgagtcaccc

SEQ ID NO: 11480 - DNA, 21 bp, Artificial sequence
  Primer
cgggactcacgtgagtcccgt

SEQ ID NO: 11481 - DNA, 21 bp, Artificial sequence
  Primer
agggactcacgtgagtccctg

SEQ ID NO: 11482 - DNA, 21 bp, Artificial sequence
  Primer
caggactcacgtgagtcctgg

SEQ ID NO: 11483 - DNA, 21 bp, Artificial sequence
  Primer
cgagactcacgtgagtctcgg

SEQ ID NO: 11484 - DNA, 21 bp, Artificial sequence
  Primer
cgggactcacgtgagtcccga

SEQ ID NO: 11485 - DNA, 21 bp, Artificial sequence
  Primer
tgggactcacgtgagtcccag

SEQ ID NO: 11486 - DNA, 21 bp, Artificial sequence
  Primer
ctggactcacgtgagtccagg

SEQ ID NO: 11487 - DNA, 21 bp, Artificial sequence
  Primer
cgtgactcacgtgagtcacgg

SEQ ID NO: 11488 - DNA, 21 bp, Artificial sequence
  Primer
ggcgactcacgtgagtcgccg

SEQ ID NO: 11489 - DNA, 21 bp, Artificial sequence
  Primer
agcgactcacgtgagtcgctg

SEQ ID NO: 11490 - DNA, 21 bp, Artificial sequence
  Primer
gacgactcacgtgagtcgtcg

SEQ ID NO: 11491 - DNA, 21 bp, Artificial sequence
  Primer
ggagactcacgtgagtctccg

SEQ ID NO: 11492 - DNA, 21 bp, Artificial sequence
  Primer
tgcgactcacgtgagtcgcag

SEQ ID NO: 11493 - DNA, 21 bp, Artificial sequence
  Primer
ggtgactcacgtgagtcaccg

SEQ ID NO: 11494 - DNA, 21 bp, Artificial sequence
  Primer
acggactcacgtgagtccgtg

SEQ ID NO: 11495 - DNA, 21 bp, Artificial sequence
  Primer
ccagactcacgtgagtctggg

SEQ ID NO: 11496 - DNA, 21 bp, Artificial sequence
  Primer
tcggactcacgtgagtccgag

SEQ ID NO: 11497 - DNA, 21 bp, Artificial sequence
  Primer
cctgactcacgtgagtcaggg

SEQ ID NO: 11498 - DNA, 21 bp, Artificial sequence
  Primer
cacgactcacgtgagtcgtgg

SEQ ID NO: 11499 - DNA, 21 bp, Artificial sequence
  Primer
gccgactcacgtgagtcggct

SEQ ID NO: 11500 - DNA, 21 bp, Artificial sequence
  Primer
gccgactcacgtgagtcggca

SEQ ID NO: 11501 - DNA, 21 bp, Artificial sequence
  Primer
cgagactcacgtgagtctcgc

SEQ ID NO: 11502 - DNA, 21 bp, Artificial sequence
  Primer
cgtgactcacgtgagtcacgc

SEQ ID NO: 11503 - DNA, 21 bp, Artificial sequence
  Primer
caggactcacgtgagtcctgc

SEQ ID NO: 11504 - DNA, 21 bp, Artificial sequence
  Primer
ctggactcacgtgagtccagc

SEQ ID NO: 11505 - DNA, 21 bp, Artificial sequence
  Primer
gaggactcacgtgagtcctcg

SEQ ID NO: 11506 - DNA, 21 bp, Artificial sequence
  Primer
gtggactcacgtgagtccacg

SEQ ID NO: 11507 - DNA, 21 bp, Artificial sequence
  Primer
accgactcacgtgagtcggtg

SEQ ID NO: 11508 - DNA, 21 bp, Artificial sequence
  Primer
tccgactcacgtgagtcggag

SEQ ID NO: 11509 - DNA, 21 bp, Artificial sequence
  Primer
cgggactcacgtgagtcccgc

SEQ ID NO: 11510 - DNA, 21 bp, Artificial sequence
  Primer
agggactcacgtgagtccctc

SEQ ID NO: 11511 - DNA, 21 bp, Artificial sequence
  Primer
tgggactcacgtgagtcccac

SEQ ID NO: 11512 - DNA, 21 bp, Artificial sequence
  Primer
  misc_feature (1)..(3): n is a, c, g, or t
  misc_feature (18)..(21): n is a, c, g, or t
nnngactcggccgagtcnnnn

SEQ ID NO: 11513 - DNA, 21 bp, Artificial sequence
  Primer
gcggactcggccgagtccgcc

SEQ ID NO: 11514 - DNA, 21 bp, Artificial sequence
  Primer
gcggactcggccgagtccgct

SEQ ID NO: 11515 - DNA, 21 bp, Artificial sequence
  Primer
acggactcggccgagtccgtc

SEQ ID NO: 11516 - DNA, 21 bp, Artificial sequence
  Primer
gaggactcggccgagtcctcc

SEQ ID NO: 11517 - DNA, 21 bp, Artificial sequence
  Primer
gcagactcggccgagtctgcc

SEQ ID NO: 11518 - DNA, 21 bp, Artificial sequence
  Primer
gcggactcggccgagtccgca

SEQ ID NO: 11519 - DNA, 21 bp, Artificial sequence
  Primer
tcggactcggccgagtccgac

SEQ ID NO: 11520 - DNA, 21 bp, Artificial sequence
  Primer
gtggactcggccgagtccacc

SEQ ID NO: 11521 - DNA, 21 bp, Artificial sequence
  Primer
gctgactcggccgagtcagcc

SEQ ID NO: 11522 - DNA, 21 bp, Artificial sequence
  Primer
cccgactcggccgagtcgggc

SEQ ID NO: 11523 - DNA, 21 bp, Artificial sequence
  Primer
cccgactcggccgagtcgggt

SEQ ID NO: 11524 - DNA, 21 bp, Artificial sequence
  Primer
accgactcggccgagtcggtc

SEQ ID NO: 11525 - DNA, 21 bp, Artificial sequence
  Primer
cacgactcggccgagtcgtgc

SEQ ID NO: 11526 - DNA, 21 bp, Artificial sequence
  Primer
ccagactcggccgagtctggc

SEQ ID NO: 11527 - DNA, 21 bp, Artificial sequence
  Primer
cccgactcggccgagtcggga

SEQ ID NO: 11528 - DNA, 21 bp, Artificial sequence
  Primer
tccgactcggccgagtcggac

SEQ ID NO: 11529 - DNA, 21 bp, Artificial sequence
  Primer
cctgactcggccgagtcaggc

SEQ ID NO: 11530 - DNA, 21 bp, Artificial sequence
  Primer
ggcgactcggccgagtcgccc

SEQ ID NO: 11531 - DNA, 21 bp, Artificial sequence
  Primer
ggcgactcggccgagtcgcct

SEQ ID NO: 11532 - DNA, 21 bp, Artificial sequence
  Primer
agcgactcggccgagtcgctc

SEQ ID NO: 11533 - DNA, 21 bp, Artificial sequence
  Primer
gacgactcggccgagtcgtcc

SEQ ID NO: 11534 - DNA, 21 bp, Artificial sequence
  Primer
ggagactcggccgagtctccc

SEQ ID NO: 11535 - DNA, 21 bp, Artificial sequence
  Primer
ggcgactcggccgagtcgcca

SEQ ID NO: 11536 - DNA, 21 bp, Artificial sequence
  Primer
tgcgactcggccgagtcgcac

SEQ ID NO: 11537 - DNA, 21 bp, Artificial sequence
  Primer
ggtgactcggccgagtcaccc

SEQ ID NO: 11538 - DNA, 21 bp, Artificial sequence
  Primer
cgggactcggccgagtcccgt

SEQ ID NO: 11539 - DNA, 21 bp, Artificial sequence
  Primer
agggactcggccgagtccctg

SEQ ID NO: 11540 - DNA, 21 bp, Artificial sequence
  Primer
caggactcggccgagtcctgg

SEQ ID NO: 11541 - DNA, 21 bp, Artificial sequence
  Primer
cgagactcggccgagtctcgg

SEQ ID NO: 11542 - DNA, 21 bp, Artificial sequence
  Primer
cgggactcggccgagtcccga

SEQ ID NO: 11543 - DNA, 21 bp, Artificial sequence
  Primer
tgggactcggccgagtcccag

SEQ ID NO: 11544 - DNA, 21 bp, Artificial sequence
  Primer
ctggactcggccgagtccagg

SEQ ID NO: 11545 - DNA, 21 bp, Artificial sequence
  Primer
cgtgactcggccgagtcacgg

SEQ ID NO: 11546 - DNA, 21 bp, Artificial sequence
  Primer
ggcgactcggccgagtcgccg

SEQ ID NO: 11547 - DNA, 21 bp, Artificial sequence
  Primer
agcgactcggccgagtcgctg

SEQ ID NO: 11548 - DNA, 21 bp, Artificial sequence
  Primer
gacgactcggccgagtcgtcg

SEQ ID NO: 11549 - DNA, 21 bp, Artificial sequence
  Primer
ggagactcggccgagtctccg

SEQ ID NO: 11550 - DNA, 21 bp, Artificial sequence
  Primer
tgcgactcggccgagtcgcag

SEQ ID NO: 11551 - DNA, 21 bp, Artificial sequence
  Primer
ggtgactcggccgagtcaccg

SEQ ID NO: 11552 - DNA, 21 bp, Artificial sequence
  Primer
acggactcggccgagtccgtg

SEQ ID NO: 11553 - DNA, 21 bp, Artificial sequence
  Primer
ccagactcggccgagtctggg

SEQ ID NO: 11554 - DNA, 21 bp, Artificial sequence
  Primer
tcggactcggccgagtccgag

SEQ ID NO: 11555 - DNA, 21 bp, Artificial sequence
  Primer
cctgactcggccgagtcaggg

SEQ ID NO: 11556 - DNA, 21 bp, Artificial sequence
  Primer
cacgactcggccgagtcgtgg

SEQ ID NO: 11557 - DNA, 21 bp, Artificial sequence
  Primer
gccgactcggccgagtcggct

SEQ ID NO: 11558 - DNA, 21 bp, Artificial sequence
  Primer
gccgactcggccgagtcggca

SEQ ID NO: 11559 - DNA, 21 bp, Artificial sequence
  Primer
cgagactcggccgagtctcgc

SEQ ID NO: 11560 - DNA, 21 bp, Artificial sequence
  Primer
cgtgactcggccgagtcacgc

SEQ ID NO: 11561 - DNA, 21 bp, Artificial sequence
  Primer
caggactcggccgagtcctgc

SEQ ID NO: 11562 - DNA, 21 bp, Artificial sequence
  Primer
ctggactcggccgagtccagc

SEQ ID NO: 11563 - DNA, 21 bp, Artificial sequence
  Primer
gaggactcggccgagtcctcg

SEQ ID NO: 11564 - DNA, 21 bp, Artificial sequence
  Primer
gtggactcggccgagtccacg

SEQ ID NO: 11565 - DNA, 21 bp, Artificial sequence
  Primer
accgactcggccgagtcggtg

SEQ ID NO: 11566 - DNA, 21 bp, Artificial sequence
  Primer
tccgactcggccgagtcggag

SEQ ID NO: 11567 - DNA, 21 bp, Artificial sequence
  Primer
cgggactcggccgagtcccgc

SEQ ID NO: 11568 - DNA, 21 bp, Artificial sequence
  Primer
agggactcggccgagtccctc

SEQ ID NO: 11569 - DNA, 21 bp, Artificial sequence
  Primer
tgggactcggccgagtcccac

SEQ ID NO: 11570 - DNA, 21 bp, Artificial sequence
  Primer
  misc_feature (1)..(3): n is a, c, g, or t
  misc_feature (18)..(21): n is a, c, g, or t
nnngactcccgggagtcnnnn

SEQ ID NO: 11571 - DNA, 21 bp, Artificial sequence
  Primer
gcggactcccgggagtccgcc

SEQ ID NO: 11572 - DNA, 21 bp, Artificial sequence
  Primer
gcggactcccgggagtccgct

SEQ ID NO: 11573 - DNA, 21 bp, Artificial sequence
  Primer
acggactcccgggagtccgtc

SEQ ID NO: 11574 - DNA, 21 bp, Artificial sequence
  Primer
gaggactcccgggagtcctcc

SEQ ID NO: 11575 - DNA, 21 bp, Artificial sequence
  Primer
gcagactcccgggagtctgcc

SEQ ID NO: 11576 - DNA, 21 bp, Artificial sequence
  Primer
gcggactcccgggagtccgca

SEQ ID NO: 11577 - DNA, 21 bp, Artificial sequence
  Primer
tcggactcccgggagtccgac

SEQ ID NO: 11578 - DNA, 21 bp, Artificial sequence
  Primer
gtggactcccgggagtccacc

SEQ ID NO: 11579 - DNA, 21 bp, Artificial sequence
  Primer
gctgactcccgggagtcagcc

SEQ ID NO: 11580 - DNA, 21 bp, Artificial sequence
  Primer
cccgactcccgggagtcgggc

SEQ ID NO: 11581 - DNA, 21 bp, Artificial sequence
  Primer
cccgactcccgggagtcgggt

SEQ ID NO: 11582 - DNA, 21 bp, Artificial sequence
  Primer
accgactcccgggagtcggtc

SEQ ID NO: 11583 - DNA, 21 bp, Artificial sequence
  Primer
cacgactcccgggagtcgtgc

SEQ ID NO: 11584 - DNA, 21 bp, Artificial sequence
  Primer
ccagactcccgggagtctggc

SEQ ID NO: 11585 - DNA, 21 bp, Artificial sequence
  Primer
cccgactcccgggagtcggga

SEQ ID NO: 11586 - DNA, 21 bp, Artificial sequence
  Primer
tccgactcccgggagtcggac

SEQ ID NO: 11587 - DNA, 21 bp, Artificial sequence
  Primer
cctgactcccgggagtcaggc

SEQ ID NO: 11588 - DNA, 21 bp, Artificial sequence
  Primer
ggcgactcccgggagtcgccc

SEQ ID NO: 11589 - DNA, 21 bp, Artificial sequence
  Primer
ggcgactcccgggagtcgcct

SEQ ID NO: 11590 - DNA, 21 bp, Artificial sequence
  Primer
agcgactcccgggagtcgctc

SEQ ID NO: 11591 - DNA, 21 bp, Artificial sequence
  Primer
gacgactcccgggagtcgtcc

SEQ ID NO: 11592 - DNA, 21 bp, Artificial sequence
  Primer
ggagactcccgggagtctccc

SEQ ID NO: 11593 - DNA, 21 bp, Artificial sequence
  Primer
ggcgactcccgggagtcgcca

SEQ ID NO: 11594 - DNA, 21 bp, Artificial sequence
  Primer
tgcgactcccgggagtcgcac

SEQ ID NO: 11595 - DNA, 21 bp, Artificial sequence
  Primer
ggtgactcccgggagtcaccc

SEQ ID NO: 11596 - DNA, 21 bp, Artificial sequence
  Primer
cgggactcccgggagtcccgt

SEQ ID NO: 11597 - DNA, 21 bp, Artificial sequence
  Primer
agggactcccgggagtccctg

SEQ ID NO: 11598 - DNA, 21 bp, Artificial sequence
  Primer
caggactcccgggagtcctgg

SEQ ID NO: 11599 - DNA, 21 bp, Artificial sequence
  Primer
cgagactcccgggagtctcgg

SEQ ID NO: 11600 - DNA, 21 bp, Artificial sequence
  Primer
cgggactcccgggagtcccga

SEQ ID NO: 11601 - DNA, 21 bp, Artificial sequence
  Primer
tgggactcccgggagtcccag

SEQ ID NO: 11602 - DNA, 21 bp, Artificial sequence
  Primer
ctggactcccgggagtccagg

SEQ ID NO: 11603 - DNA, 21 bp, Artificial sequence
  Primer
cgtgactcccgggagtcacgg

SEQ ID NO: 11604 - DNA, 21 bp, Artificial sequence
  Primer
ggcgactcccgggagtcgccg

SEQ ID NO: 11605 - DNA, 21 bp, Artificial sequence
  Primer
agcgactcccgggagtcgctg

SEQ ID NO: 11606 - DNA, 21 bp, Artificial sequence
  Primer
gacgactcccgggagtcgtcg

SEQ ID NO: 11607 - DNA, 21 bp, Artificial sequence
  Primer
ggagactcccgggagtctccg

SEQ ID NO: 11608 - DNA, 21 bp, Artificial sequence
  Primer
tgcgactcccgggagtcgcag

SEQ ID NO: 11609 - DNA, 21 bp, Artificial sequence
  Primer
ggtgactcccgggagtcaccg

SEQ ID NO: 11610 - DNA, 21 bp, Artificial sequence
  Primer
acggactcccgggagtccgtg

SEQ ID NO: 11611 - DNA, 21 bp, Artificial sequence
  Primer
ccagactcccgggagtctggg

SEQ ID NO: 11612 - DNA, 21 bp, Artificial sequence
  Primer
tcggactcccgggagtccgag

SEQ ID NO: 11613 - DNA, 21 bp, Artificial sequence
  Primer
cctgactcccgggagtcaggg

SEQ ID NO: 11614 - DNA, 21 bp, Artificial sequence
  Primer
cacgactcccgggagtcgtgg

SEQ ID NO: 11615 - DNA, 21 bp, Artificial sequence
  Primer
gccgactcccgggagtcggct

SEQ ID NO: 11616 - DNA, 21 bp, Artificial sequence
  Primer
gccgactcccgggagtcggca

SEQ ID NO: 11617 - DNA, 21 bp, Artificial sequence
  Primer
cgagactcccgggagtctcgc

SEQ ID NO: 11618 - DNA, 21 bp, Artificial sequence
  Primer
cgtgactcccgggagtcacgc

SEQ ID NO: 11619 - DNA, 21 bp, Artificial sequence
  Primer
caggactcccgggagtcctgc

SEQ ID NO: 11620 - DNA, 21 bp, Artificial sequence
  Primer
ctggactcccgggagtccagc

SEQ ID NO: 11621 - DNA, 21 bp, Artificial sequence
  Primer
gaggactcccgggagtcctcg

SEQ ID NO: 11622 - DNA, 21 bp, Artificial sequence
  Primer
gtggactcccgggagtccacg

SEQ ID NO: 11623 - DNA, 21 bp, Artificial sequence
  Primer
accgactcccgggagtcggtg

SEQ ID NO: 11624 - DNA, 21 bp, Artificial sequence
  Primer
tccgactcccgggagtcggag

SEQ ID NO: 11625 - DNA, 21 bp, Artificial sequence
  Primer
cgggactcccgggagtcccgc

SEQ ID NO: 11626 - DNA, 21 bp, Artificial sequence
  Primer
agggactcccgggagtccctc

SEQ ID NO: 11627 - DNA, 21 bp, Artificial sequence
  Primer
tgggactcccgggagtcccac

SEQ ID NO: 11628 - DNA, 21 bp, Artificial sequence
  Primer
  misc_feature (1)..(3): n is a, c, g, or t
  misc_feature (18)..(21): n is a, c, g, or t
nnngactcgtacgagtcnnnn

SEQ ID NO: 11629 - DNA, 21 bp, Artificial sequence
  Primer
gcggactcgtacgagtccgcc

SEQ ID NO: 11630 - DNA, 21 bp, Artificial sequence
  Primer
gcggactcgtacgagtccgct

SEQ ID NO: 11631 - DNA, 21 bp, Artificial sequence
  Primer
acggactcgtacgagtccgtc

SEQ ID NO: 11632 - DNA, 21 bp, Artificial sequence
  Primer
gaggactcgtacgagtcctcc

SEQ ID NO: 11633 - DNA, 21 bp, Artificial sequence
  Primer
gcagactcgtacgagtctgcc

SEQ ID NO: 11634 - DNA, 21 bp, Artificial sequence
  Primer
gcggactcgtacgagtccgca

SEQ ID NO: 11635 - DNA, 21 bp, Artificial sequence
  Primer
tcggactcgtacgagtccgac

SEQ ID NO: 11636 - DNA, 21 bp, Artificial sequence
  Primer
gtggactcgtacgagtccacc

SEQ ID NO: 11637 - DNA, 21 bp, Artificial sequence
  Primer
gctgactcgtacgagtcagcc

SEQ ID NO: 11638 - DNA, 21 bp, Artificial sequence
  Primer
cccgactcgtacgagtcgggc

SEQ ID NO: 11639 - DNA, 21 bp, Artificial sequence
  Primer
cccgactcgtacgagtcgggt

SEQ ID NO: 11640 - DNA, 21 bp, Artificial sequence
  Primer
accgactcgtacgagtcggtc

SEQ ID NO: 11641 - DNA, 21 bp, Artificial sequence
  Primer
cacgactcgtacgagtcgtgc

SEQ ID NO: 11642 - DNA, 21 bp, Artificial sequence
  Primer
ccagactcgtacgagtctggc

SEQ ID NO: 11643 - DNA, 21 bp, Artificial sequence
  Primer
cccgactcgtacgagtcggga

SEQ ID NO: 11644 - DNA, 21 bp, Artificial sequence
  Primer
tccgactcgtacgagtcggac

SEQ ID NO: 11645 - DNA, 21 bp, Artificial sequence
  Primer
cctgactcgtacgagtcaggc

SEQ ID NO: 11646 - DNA, 21 bp, Artificial sequence
  Primer
ggcgactcgtacgagtcgccc

SEQ ID NO: 11647 - DNA, 21 bp, Artificial sequence
  Primer
ggcgactcgtacgagtcgcct

SEQ ID NO: 11648 - DNA, 21 bp, Artificial sequence
  Primer
agcgactcgtacgagtcgctc

SEQ ID NO: 11649 - DNA, 21 bp, Artificial sequence
  Primer
gacgactcgtacgagtcgtcc

SEQ ID NO: 11650 - DNA, 21 bp, Artificial sequence
  Primer
ggagactcgtacgagtctccc

SEQ ID NO: 11651 - DNA, 21 bp, Artificial sequence
  Primer
ggcgactcgtacgagtcgcca

SEQ ID NO: 11652 - DNA, 21 bp, Artificial sequence
  Primer
tgcgactcgtacgagtcgcac

SEQ ID NO: 11653 - DNA, 21 bp, Artificial sequence
  Primer
ggtgactcgtacgagtcaccc

SEQ ID NO: 11654 - DNA, 21 bp, Artificial sequence
  Primer
cgggactcgtacgagtcccgt

SEQ ID NO: 11655 - DNA, 21 bp, Artificial sequence
  Primer
agggactcgtacgagtccctg

SEQ ID NO: 11656 - DNA, 21 bp, Artificial sequence
  Primer
caggactcgtacgagtcctgg

SEQ ID NO: 11657 - DNA, 21 bp, Artificial sequence
  Primer
cgagactcgtacgagtctcgg

SEQ ID NO: 11658 - DNA, 21 bp, Artificial sequence
  Primer
cgggactcgtacgagtcccga

SEQ ID NO: 11659 - DNA, 21 bp, Artificial sequence
  Primer
tgggactcgtacgagtcccag

SEQ ID NO: 11660 - DNA, 21 bp, Artificial sequence
  Primer
ctggactcgtacgagtccagg

SEQ ID NO: 11661 - DNA, 21 bp, Artificial sequence
  Primer
cgtgactcgtacgagtcacgg

SEQ ID NO: 11662 - DNA, 21 bp, Artificial sequence
  Primer
ggcgactcgtacgagtcgccg

SEQ ID NO: 11663 - DNA, 21 bp, Artificial sequence
  Primer
agcgactcgtacgagtcgctg

SEQ ID NO: 11664 - DNA, 21 bp, Artificial sequence
  Primer
gacgactcgtacgagtcgtcg

SEQ ID NO: 11665 - DNA, 21 bp, Artificial sequence
  Primer
ggagactcgtacgagtctccg

SEQ ID NO: 11666 - DNA, 21 bp, Artificial sequence
  Primer
tgcgactcgtacgagtcgcag

SEQ ID NO: 11667 - DNA, 21 bp, Artificial sequence
  Primer
ggtgactcgtacgagtcaccg

SEQ ID NO: 11668 - DNA, 21 bp, Artificial sequence
  Primer
acggactcgtacgagtccgtg

SEQ ID NO: 11669 - DNA, 21 bp, Artificial sequence
  Primer
ccagactcgtacgagtctggg

SEQ ID NO: 11670 - DNA, 21 bp, Artificial sequence
  Primer
tcggactcgtacgagtccgag

SEQ ID NO: 11671 - DNA, 21 bp, Artificial sequence
  Primer
cctgactcgtacgagtcaggg

SEQ ID NO: 11672 - DNA, 21 bp, Artificial sequence
  Primer
cacgactcgtacgagtcgtgg

SEQ ID NO: 11673 - DNA, 21 bp, Artificial sequence
  Primer
gccgactcgtacgagtcggct

SEQ ID NO: 11674 - DNA, 21 bp, Artificial sequence
  Primer
gccgactcgtacgagtcggca

SEQ ID NO: 11675 - DNA, 21 bp, Artificial sequence
  Primer
cgagactcgtacgagtctcgc

SEQ ID NO: 11676 - DNA, 21 bp, Artificial sequence
  Primer
cgtgactcgtacgagtcacgc

SEQ ID NO: 11677 - DNA, 21 bp, Artificial sequence
  Primer
caggactcgtacgagtcctgc

SEQ ID NO: 11678 - DNA, 21 bp, Artificial sequence
  Primer
ctggactcgtacgagtccagc

SEQ ID NO: 11679 - DNA, 21 bp, Artificial sequence
  Primer
gaggactcgtacgagtcctcg

SEQ ID NO: 11680 - DNA, 21 bp, Artificial sequence
  Primer
gtggactcgtacgagtccacg

SEQ ID NO: 11681 - DNA, 21 bp, Artificial sequence
  Primer
accgactcgtacgagtcggtg

SEQ ID NO: 11682 - DNA, 21 bp, Artificial sequence
  Primer
tccgactcgtacgagtcggag

SEQ ID NO: 11683 - DNA, 21 bp, Artificial sequence
  Primer
cgggactcgtacgagtcccgc

SEQ ID NO: 11684 - DNA, 21 bp, Artificial sequence
  Primer
agggactcgtacgagtccctc

SEQ ID NO: 11685 - DNA, 21 bp, Artificial sequence
  Primer
tgggactcgtacgagtcccac

SEQ ID NO: 11686 - DNA, 21 bp, Artificial sequence
  Primer
  misc_feature (1)..(3): n is a, c, g, or t
  misc_feature (18)..(21): n is a, c, g, or t
nnngactcctaggagtcnnnn

SEQ ID NO: 11687 - DNA, 21 bp, Artificial sequence
  Primer
gcggactcctaggagtccgcc

SEQ ID NO: 11688 - DNA, 21 bp, Artificial sequence
  Primer
gcggactcctaggagtccgct

SEQ ID NO: 11689 - DNA, 21 bp, Artificial sequence
  Primer
acggactcctaggagtccgtc

SEQ ID NO: 11690 - DNA, 21 bp, Artificial sequence
  Primer
gaggactcctaggagtcctcc

SEQ ID NO: 11691 - DNA, 21 bp, Artificial sequence
  Primer
gcagactcctaggagtctgcc

SEQ ID NO: 11692 - DNA, 21 bp, Artificial sequence
  Primer
gcggactcctaggagtccgca

SEQ ID NO: 11693 - DNA, 21 bp, Artificial sequence
  Primer
tcggactcctaggagtccgac

SEQ ID NO: 11694 - DNA, 21 bp, Artificial sequence
  Primer
gtggactcctaggagtccacc

SEQ ID NO: 11695 - DNA, 21 bp, Artificial sequence
  Primer
gctgactcctaggagtcagcc

SEQ ID NO: 11696 - DNA, 21 bp, Artificial sequence
  Primer
cccgactcctaggagtcgggc

SEQ ID NO: 11697 - DNA, 21 bp, Artificial sequence
  Primer
cccgactcctaggagtcgggt

SEQ ID NO: 11698 - DNA, 21 bp, Artificial sequence
  Primer
accgactcctaggagtcggtc

SEQ ID NO: 11699 - DNA, 21 bp, Artificial sequence
  Primer
cacgactcctaggagtcgtgc

SEQ ID NO: 11700 - DNA, 21 bp, Artificial sequence
  Primer
ccagactcctaggagtctggc

SEQ ID NO: 11701 - DNA, 21 bp, Artificial sequence
  Primer
cccgactcctaggagtcggga

SEQ ID NO: 11702 - DNA, 21 bp, Artificial sequence
  Primer
tccgactcctaggagtcggac

SEQ ID NO: 11703 - DNA, 21 bp, Artificial sequence
  Primer
cctgactcctaggagtcaggc

SEQ ID NO: 11704 - DNA, 21 bp, Artificial sequence
  Primer
ggcgactcctaggagtcgccc

SEQ ID NO: 11705 - DNA, 21 bp, Artificial sequence
  Primer
ggcgactcctaggagtcgcct

SEQ ID NO: 11706 - DNA, 21 bp, Artificial sequence
  Primer
agcgactcctaggagtcgctc

SEQ ID NO: 11707 - DNA, 21 bp, Artificial sequence
  Primer
gacgactcctaggagtcgtcc

SEQ ID NO: 11708 - DNA, 21 bp, Artificial sequence
  Primer
ggagactcctaggagtctccc

SEQ ID NO: 11709 - DNA, 21 bp, Artificial sequence
  Primer
ggcgactcctaggagtcgcca

SEQ ID NO: 11710 - DNA, 21 bp, Artificial sequence
  Primer
tgcgactcctaggagtcgcac

SEQ ID NO: 11711 - DNA, 21 bp, Artificial sequence
  Primer
ggtgactcctaggagtcaccc

SEQ ID NO: 11712 - DNA, 21 bp, Artificial sequence
  Primer
cgggactcctaggagtcccgt

SEQ ID NO: 11713 - DNA, 21 bp, Artificial sequence
  Primer
agggactcctaggagtccctg

SEQ ID NO: 11714 - DNA, 21 bp, Artificial sequence
  Primer
caggactcctaggagtcctgg

SEQ ID NO: 11715 - DNA, 21 bp, Artificial sequence
  Primer
cgagactcctaggagtctcgg

SEQ ID NO: 11716 - DNA, 21 bp, Artificial sequence
  Primer
cgggactcctaggagtcccga

SEQ ID NO: 11717 - DNA, 21 bp, Artificial sequence
  Primer
tgggactcctaggagtcccag

SEQ ID NO: 11718 - DNA, 21 bp, Artificial sequence
  Primer
ctggactcctaggagtccagg

SEQ ID NO: 11719 - DNA, 21 bp, Artificial sequence
  Primer
cgtgactcctaggagtcacgg

SEQ ID NO: 11720 - DNA, 21 bp, Artificial sequence
  Primer
ggcgactcctaggagtcgccg

SEQ ID NO: 11721 - DNA, 21 bp, Artificial sequence
  Primer
agcgactcctaggagtcgctg

SEQ ID NO: 11722 - DNA, 21 bp, Artificial sequence
  Primer
gacgactcctaggagtcgtcg

SEQ ID NO: 11723 - DNA, 21 bp, Artificial sequence
  Primer
ggagactcctaggagtctccg

SEQ ID NO: 11724 - DNA, 21 bp, Artificial sequence
  Primer
tgcgactcctaggagtcgcag

SEQ ID NO: 11725 - DNA, 21 bp, Artificial sequence
  Primer
ggtgactcctaggagtcaccg

SEQ ID NO: 11726 - DNA, 21 bp, Artificial sequence
  Primer
acggactcctaggagtccgtg

SEQ ID NO: 11727 - DNA, 21 bp, Artificial sequence
  Primer
ccagactcctaggagtctggg

SEQ ID NO: 11728 - DNA, 21 bp, Artificial sequence
  Primer
tcggactcctaggagtccgag

SEQ ID NO: 11729 - DNA, 21 bp, Artificial sequence
  Primer
cctgactcctaggagtcaggg

SEQ ID NO: 11730 - DNA, 21 bp, Artificial sequence
  Primer
cacgactcctaggagtcgtgg

SEQ ID NO: 11731 - DNA, 21 bp, Artificial sequence
  Primer
gccgactcctaggagtcggct

SEQ ID NO: 11732 - DNA, 21 bp, Artificial sequence
  Primer
gccgactcctaggagtcggca

SEQ ID NO: 11733 - DNA, 21 bp, Artificial sequence
  Primer
cgagactcctaggagtctcgc

SEQ ID NO: 11734 - DNA, 21 bp, Artificial sequence
  Primer
cgtgactcctaggagtcacgc

SEQ ID NO: 11735 - DNA, 21 bp, Artificial sequence
  Primer
caggactcctaggagtcctgc

SEQ ID NO: 11736 - DNA, 21 bp, Artificial sequence
  Primer
ctggactcctaggagtccagc

SEQ ID NO: 11737 - DNA, 21 bp, Artificial sequence
  Primer
gaggactcctaggagtcctcg

SEQ ID NO: 11738 - DNA, 21 bp, Artificial sequence
  Primer
gtggactcctaggagtccacg

SEQ ID NO: 11739 - DNA, 21 bp, Artificial sequence
  Primer
accgactcctaggagtcggtg

SEQ ID NO: 11740 - DNA, 21 bp, Artificial sequence
  Primer
tccgactcctaggagtcggag

SEQ ID NO: 11741 - DNA, 21 bp, Artificial sequence
  Primer
cgggactcctaggagtcccgc

SEQ ID NO: 11742 - DNA, 21 bp, Artificial sequence
  Primer
agggactcctaggagtccctc

SEQ ID NO: 11743 - DNA, 21 bp, Artificial sequence
  Primer
tgggactcctaggagtcccac

SEQ ID NO: 11744 - DNA, 21 bp, Artificial sequence
  Primer
  misc_feature (1)..(3): n is a, c, g, or t
  misc_feature (18)..(21): n is a, c, g, or t
nnngactccatggagtcnnnn

SEQ ID NO: 11745 - DNA, 21 bp, Artificial sequence
  Primer
gcggactccatggagtccgcc

SEQ ID NO: 11746 - DNA, 21 bp, Artificial sequence
  Primer
gcggactccatggagtccgct

SEQ ID NO: 11747 - DNA, 21 bp, Artificial sequence
  Primer
acggactccatggagtccgtc

SEQ ID NO: 11748 - DNA, 21 bp, Artificial sequence
  Primer
gaggactccatggagtcctcc

SEQ ID NO: 11749 - DNA, 21 bp, Artificial sequence
  Primer
gcagactccatggagtctgcc

SEQ ID NO: 11750 - DNA, 21 bp, Artificial sequence
  Primer
gcggactccatggagtccgca

SEQ ID NO: 11751 - DNA, 21 bp, Artificial sequence
  Primer
tcggactccatggagtccgac

SEQ ID NO: 11752 - DNA, 21 bp, Artificial sequence
  Primer
gtggactccatggagtccacc

SEQ ID NO: 11753 - DNA, 21 bp, Artificial sequence
  Primer
gctgactccatggagtcagcc

SEQ ID NO: 11754 - DNA, 21 bp, Artificial sequence
  Primer
cccgactccatggagtcgggc

SEQ ID NO: 11755 - DNA, 21 bp, Artificial sequence
  Primer
cccgactccatggagtcgggt

SEQ ID NO: 11756 - DNA, 21 bp, Artificial sequence
  Primer
accgactccatggagtcggtc

SEQ ID NO: 11757 - DNA, 21 bp, Artificial sequence
  Primer
cacgactccatggagtcgtgc

SEQ ID NO: 11758 - DNA, 21 bp, Artificial sequence
  Primer
ccagactccatggagtctggc

SEQ ID NO: 11759 - DNA, 21 bp, Artificial sequence
  Primer
cccgactccatggagtcggga

SEQ ID NO: 11760 - DNA, 21 bp, Artificial sequence
  Primer
tccgactccatggagtcggac

SEQ ID NO: 11761 - DNA, 21 bp, Artificial sequence
  Primer
cctgactccatggagtcaggc

SEQ ID NO: 11762 - DNA, 21 bp, Artificial sequence
  Primer
ggcgactccatggagtcgccc

SEQ ID NO: 11763 - DNA, 21 bp, Artificial sequence
  Primer
ggcgactccatggagtcgcct

SEQ ID NO: 11764 - DNA, 21 bp, Artificial sequence
  Primer
agcgactccatggagtcgctc

SEQ ID NO: 11765 - DNA, 21 bp, Artificial sequence
  Primer
gacgactccatggagtcgtcc

SEQ ID NO: 11766 - DNA, 21 bp, Artificial sequence
  Primer
ggagactccatggagtctccc

SEQ ID NO: 11767 - DNA, 21 bp, Artificial sequence
  Primer
ggcgactccatggagtcgcca

SEQ ID NO: 11768 - DNA, 21 bp, Artificial sequence
  Primer
tgcgactccatggagtcgcac

SEQ ID NO: 11769 - DNA, 21 bp, Artificial sequence
  Primer
ggtgactccatggagtcaccc

SEQ ID NO: 11770 - DNA, 21 bp, Artificial sequence
  Primer
cgggactccatggagtcccgt

SEQ ID NO: 11771 - DNA, 21 bp, Artificial sequence
  Primer
agggactccatggagtccctg

SEQ ID NO: 11772 - DNA, 21 bp, Artificial sequence
  Primer
caggactccatggagtcctgg

SEQ ID NO: 11773 - DNA, 21 bp, Artificial sequence
  Primer
cgagactccatggagtctcgg

SEQ ID NO: 11774 - DNA, 21 bp, Artificial sequence
  Primer
cgggactccatggagtcccga

SEQ ID NO: 11775 - DNA, 21 bp, Artificial sequence
  Primer
tgggactccatggagtcccag

SEQ ID NO: 11776 - DNA, 21 bp, Artificial sequence
  Primer
ctggactccatggagtccagg

SEQ ID NO: 11777 - DNA, 21 bp, Artificial sequence
  Primer
cgtgactccatggagtcacgg

SEQ ID NO: 11778 - DNA, 21 bp, Artificial sequence
  Primer
ggcgactccatggagtcgccg

SEQ ID NO: 11779 - DNA, 21 bp, Artificial sequence
  Primer
agcgactccatggagtcgctg

SEQ ID NO: 11780 - DNA, 21 bp, Artificial sequence
  Primer
gacgactccatggagtcgtcg

SEQ ID NO: 11781 - DNA, 21 bp, Artificial sequence
  Primer
ggagactccatggagtctccg

SEQ ID NO: 11782 - DNA, 21 bp, Artificial sequence
  Primer
tgcgactccatggagtcgcag

SEQ ID NO: 11783 - DNA, 21 bp, Artificial sequence
  Primer
ggtgactccatggagtcaccg

SEQ ID NO: 11784 - DNA, 21 bp, Artificial sequence
  Primer
acggactccatggagtccgtg

SEQ ID NO: 11785 - DNA, 21 bp, Artificial sequence
  Primer
ccagactccatggagtctggg

SEQ ID NO: 11786 - DNA, 21 bp, Artificial sequence
  Primer
tcggactccatggagtccgag

SEQ ID NO: 11787 - DNA, 21 bp, Artificial sequence
  Primer
cctgactccatggagtcaggg

SEQ ID NO: 11788 - DNA, 21 bp, Artificial sequence
  Primer
cacgactccatggagtcgtgg

SEQ ID NO: 11789 - DNA, 21 bp, Artificial sequence
  Primer
gccgactccatggagtcggct

SEQ ID NO: 11790 - DNA, 21 bp, Artificial sequence
  Primer
gccgactccatggagtcggca

SEQ ID NO: 11791 - DNA, 21 bp, Artificial sequence
  Primer
cgagactccatggagtctcgc

SEQ ID NO: 11792 - DNA, 21 bp, Artificial sequence
  Primer
cgtgactccatggagtcacgc

SEQ ID NO: 11793 - DNA, 21 bp, Artificial sequence
  Primer
caggactccatggagtcctgc

SEQ ID NO: 11794 - DNA, 21 bp, Artificial sequence
  Primer
ctggactccatggagtccagc

SEQ ID NO: 11795 - DNA, 21 bp, Artificial sequence
  Primer
gaggactccatggagtcctcg

SEQ ID NO: 11796 - DNA, 21 bp, Artificial sequence
  Primer
gtggactccatggagtccacg

SEQ ID NO: 11797 - DNA, 21 bp, Artificial sequence
  Primer
accgactccatggagtcggtg

SEQ ID NO: 11798 - DNA, 21 bp, Artificial sequence
  Primer
tccgactccatggagtcggag

SEQ ID NO: 11799 - DNA, 21 bp, Artificial sequence
  Primer
cgggactccatggagtcccgc

SEQ ID NO: 11800 - DNA, 21 bp, Artificial sequence
  Primer
agggactccatggagtccctc

SEQ ID NO: 11801 - DNA, 21 bp, Artificial sequence
  Primer
tgggactccatggagtcccac

SEQ ID NO: 11802 - DNA, 21 bp, Artificial sequence
  Primer
  misc_feature (1)..(3): n is a, c, g, or t
  misc_feature (18)..(21): n is a, c, g, or t
nnngactctcgagagtcnnnn

SEQ ID NO: 11803 - DNA, 21 bp, Artificial sequence
  Primer
gcggactctcgagagtccgcc

SEQ ID NO: 11804 - DNA, 21 bp, Artificial sequence
  Primer
gcggactctcgagagtccgct

SEQ ID NO: 11805 - DNA, 21 bp, Artificial sequence
  Primer
acggactctcgagagtccgtc

SEQ ID NO: 11806 - DNA, 21 bp, Artificial sequence
  Primer
gaggactctcgagagtcctcc

SEQ ID NO: 11807 - DNA, 21 bp, Artificial sequence
  Primer
gcagactctcgagagtctgcc

SEQ ID NO: 11808 - DNA, 21 bp, Artificial sequence
  Primer
gcggactctcgagagtccgca

SEQ ID NO: 11809 - DNA, 21 bp, Artificial sequence
  Primer
tcggactctcgagagtccgac

SEQ ID NO: 11810 - DNA, 21 bp, Artificial sequence
  Primer
gtggactctcgagagtccacc

SEQ ID NO: 11811 - DNA, 21 bp, Artificial sequence
  Primer
gctgactctcgagagtcagcc

SEQ ID NO: 11812 - DNA, 21 bp, Artificial sequence
  Primer
cccgactctcgagagtcgggc

SEQ ID NO: 11813 - DNA, 21 bp, Artificial sequence
  Primer
cccgactctcgagagtcgggt

SEQ ID NO: 11814 - DNA, 21 bp, Artificial sequence
  Primer
accgactctcgagagtcggtc

SEQ ID NO: 11815 - DNA, 21 bp, Artificial sequence
  Primer
cacgactctcgagagtcgtgc

SEQ ID NO: 11816 - DNA, 21 bp, Artificial sequence
  Primer
ccagactctcgagagtctggc

SEQ ID NO: 11817 - DNA, 21 bp, Artificial sequence
  Primer
cccgactctcgagagtcggga

SEQ ID NO: 11818 - DNA, 21 bp, Artificial sequence
  Primer
tccgactctcgagagtcggac

SEQ ID NO: 11819 - DNA, 21 bp, Artificial sequence
  Primer
cctgactctcgagagtcaggc

SEQ ID NO: 11820 - DNA, 21 bp, Artificial sequence
  Primer
ggcgactctcgagagtcgccc

SEQ ID NO: 11821 - DNA, 21 bp, Artificial sequence
  Primer
ggcgactctcgagagtcgcct

SEQ ID NO: 11822 - DNA, 21 bp, Artificial sequence
  Primer
agcgactctcgagagtcgctc

SEQ ID NO: 11823 - DNA, 21 bp, Artificial sequence
  Primer
gacgactctcgagagtcgtcc

SEQ ID NO: 11824 - DNA, 21 bp, Artificial sequence
  Primer
ggagactctcgagagtctccc

SEQ ID NO: 11825 - DNA, 21 bp, Artificial sequence
  Primer
ggcgactctcgagagtcgcca

SEQ ID NO: 11826 - DNA, 21 bp, Artificial sequence
  Primer
tgcgactctcgagagtcgcac

SEQ ID NO: 11827 - DNA, 21 bp, Artificial sequence
  Primer
ggtgactctcgagagtcaccc

SEQ ID NO: 11828 - DNA, 21 bp, Artificial sequence
  Primer
cgggactctcgagagtcccgt

SEQ ID NO: 11829 - DNA, 21 bp, Artificial sequence
  Primer
agggactctcgagagtccctg

SEQ ID NO: 11830 - DNA, 21 bp, Artificial sequence
  Primer
caggactctcgagagtcctgg

SEQ ID NO: 11831 - DNA, 21 bp, Artificial sequence
  Primer
cgagactctcgagagtctcgg

SEQ ID NO: 11832 - DNA, 21 bp, Artificial sequence
  Primer
cgggactctcgagagtcccga

SEQ ID NO: 11833 - DNA, 21 bp, Artificial sequence
  Primer
tgggactctcgagagtcccag

SEQ ID NO: 11834 - DNA, 21 bp, Artificial sequence
  Primer
ctggactctcgagagtccagg

SEQ ID NO: 11835 - DNA, 21 bp, Artificial sequence
  Primer
cgtgactctcgagagtcacgg

SEQ ID NO: 11836 - DNA, 21 bp, Artificial sequence
  Primer
ggcgactctcgagagtcgccg

SEQ ID NO: 11837 - DNA, 21 bp, Artificial sequence
  Primer
agcgactctcgagagtcgctg

SEQ ID NO: 11838 - DNA, 21 bp, Artificial sequence
  Primer
gacgactctcgagagtcgtcg

SEQ ID NO: 11839 - DNA, 21 bp, Artificial sequence
  Primer
ggagactctcgagagtctccg

SEQ ID NO: 11840 - DNA, 21 bp, Artificial sequence
  Primer
tgcgactctcgagagtcgcag

SEQ ID NO: 11841 - DNA, 21 bp, Artificial sequence
  Primer
ggtgactctcgagagtcaccg

SEQ ID NO: 11842 - DNA, 21 bp, Artificial sequence
  Primer
acggactctcgagagtccgtg

SEQ ID NO: 11843 - DNA, 21 bp, Artificial sequence
  Primer
ccagactctcgagagtctggg

SEQ ID NO: 11844 - DNA, 21 bp, Artificial sequence
  Primer
tcggactctcgagagtccgag

SEQ ID NO: 11845 - DNA, 21 bp, Artificial sequence
  Primer
cctgactctcgagagtcaggg

SEQ ID NO: 11846 - DNA, 21 bp, Artificial sequence
  Primer
cacgactctcgagagtcgtgg

SEQ ID NO: 11847 - DNA, 21 bp, Artificial sequence
  Primer
gccgactctcgagagtcggct

SEQ ID NO: 11848 - DNA, 21 bp, Artificial sequence
  Primer
gccgactctcgagagtcggca

SEQ ID NO: 11849 - DNA, 21 bp, Artificial sequence
  Primer
cgagactctcgagagtctcgc

SEQ ID NO: 11850 - DNA, 21 bp, Artificial sequence
  Primer
cgtgactctcgagagtcacgc

SEQ ID NO: 11851 - DNA, 21 bp, Artificial sequence
  Primer
caggactctcgagagtcctgc

SEQ ID NO: 11852 - DNA, 21 bp, Artificial sequence
  Primer
ctggactctcgagagtccagc

SEQ ID NO: 11853 - DNA, 21 bp, Artificial sequence
  Primer
gaggactctcgagagtcctcg

SEQ ID NO: 11854 - DNA, 21 bp, Artificial sequence
  Primer
gtggactctcgagagtccacg

SEQ ID NO: 11855 - DNA, 21 bp, Artificial sequence
  Primer
accgactctcgagagtcggtg

SEQ ID NO: 11856 - DNA, 21 bp, Artificial sequence
  Primer
tccgactctcgagagtcggag

SEQ ID NO: 11857 - DNA, 21 bp, Artificial sequence
  Primer
cgggactctcgagagtcccgc

SEQ ID NO: 11858 - DNA, 21 bp, Artificial sequence
  Primer
agggactctcgagagtccctc

SEQ ID NO: 11859 - DNA, 21 bp, Artificial sequence
  Primer
tgggactctcgagagtcccac

SEQ ID NO: 11860 - DNA, 21 bp, Artificial sequence
  Primer
  misc_feature (1)..(3): n is a, c, g, or t
  misc_feature (18)..(21): n is a, c, g, or t
nnngactcagctgagtcnnnn

SEQ ID NO: 11861 - DNA, 21 bp, Artificial sequence
  Primer
gcggactcagctgagtccgcc

SEQ ID NO: 11862 - DNA, 21 bp, Artificial sequence
  Primer
gcggactcagctgagtccgct

SEQ ID NO: 11863 - DNA, 21 bp, Artificial sequence
  Primer
acggactcagctgagtccgtc

SEQ ID NO: 11864 - DNA, 21 bp, Artificial sequence
  Primer
gaggactcagctgagtcctcc

SEQ ID NO: 11865 - DNA, 21 bp, Artificial sequence
  Primer
gcagactcagctgagtctgcc

SEQ ID NO: 11866 - DNA, 21 bp, Artificial sequence
  Primer
gcggactcagctgagtccgca

SEQ ID NO: 11867 - DNA, 21 bp, Artificial sequence
  Primer
tcggactcagctgagtccgac

SEQ ID NO: 11868 - DNA, 21 bp, Artificial sequence
  Primer
gtggactcagctgagtccacc

SEQ ID NO: 11869 - DNA, 21 bp, Artificial sequence
  Primer
gctgactcagctgagtcagcc

SEQ ID NO: 11870 - DNA, 21 bp, Artificial sequence
  Primer
cccgactcagctgagtcgggc

SEQ ID NO: 11871 - DNA, 21 bp, Artificial sequence
  Primer
cccgactcagctgagtcgggt

SEQ ID NO: 11872 - DNA, 21 bp, Artificial sequence
  Primer
accgactcagctgagtcggtc

SEQ ID NO: 11873 - DNA, 21 bp, Artificial sequence
  Primer
cacgactcagctgagtcgtgc

SEQ ID NO: 11874 - DNA, 21 bp, Artificial sequence
  Primer
ccagactcagctgagtctggc

SEQ ID NO: 11875 - DNA, 21 bp, Artificial sequence
  Primer
cccgactcagctgagtcggga

SEQ ID NO: 11876 - DNA, 21 bp, Artificial sequence
  Primer
tccgactcagctgagtcggac

SEQ ID NO: 11877 - DNA, 21 bp, Artificial sequence
  Primer
cctgactcagctgagtcaggc

SEQ ID NO: 11878 - DNA, 21 bp, Artificial sequence
  Primer
ggcgactcagctgagtcgccc

SEQ ID NO: 11879 - DNA, 21 bp, Artificial sequence
  Primer
ggcgactcagctgagtcgcct

SEQ ID NO: 11880 - DNA, 21 bp, Artificial sequence
  Primer
agcgactcagctgagtcgctc

SEQ ID NO: 11881 - DNA, 21 bp, Artificial sequence
  Primer
gacgactcagctgagtcgtcc

SEQ ID NO: 11882 - DNA, 21 bp, Artificial sequence
  Primer
ggagactcagctgagtctccc

SEQ ID NO: 11883 - DNA, 21 bp, Artificial sequence
  Primer
ggcgactcagctgagtcgcca

SEQ ID NO: 11884 - DNA, 21 bp, Artificial sequence
  Primer
tgcgactcagctgagtcgcac

SEQ ID NO: 11885 - DNA, 21 bp, Artificial sequence
  Primer
ggtgactcagctgagtcaccc

SEQ ID NO: 11886 - DNA, 21 bp, Artificial sequence
  Primer
cgggactcagctgagtcccgt

SEQ ID NO: 11887 - DNA, 21 bp, Artificial sequence
  Primer
agggactcagctgagtccctg

SEQ ID NO: 11888 - DNA, 21 bp, Artificial sequence
  Primer
caggactcagctgagtcctgg

SEQ ID NO: 11889 - DNA, 21 bp, Artificial sequence
  Primer
cgagactcagctgagtctcgg

SEQ ID NO: 11890 - DNA, 21 bp, Artificial sequence
  Primer
cgggactcagctgagtcccga

SEQ ID NO: 11891 - DNA, 21 bp, Artificial sequence
  Primer
tgggactcagctgagtcccag

SEQ ID NO: 11892 - DNA, 21 bp, Artificial sequence
  Primer
ctggactcagctgagtccagg

SEQ ID NO: 11893 - DNA, 21 bp, Artificial sequence
  Primer
cgtgactcagctgagtcacgg

SEQ ID NO: 11894 - DNA, 21 bp, Artificial sequence
  Primer
ggcgactcagctgagtcgccg

SEQ ID NO: 11895 - DNA, 21 bp, Artificial sequence
  Primer
agcgactcagctgagtcgctg

SEQ ID NO: 11896 - DNA, 21 bp, Artificial sequence
  Primer
gacgactcagctgagtcgtcg

SEQ ID NO: 11897 - DNA, 21 bp, Artificial sequence
  Primer
ggagactcagctgagtctccg

SEQ ID NO: 11898 - DNA, 21 bp, Artificial sequence
  Primer
tgcgactcagctgagtcgcag

SEQ ID NO: 11899 - DNA, 21 bp, Artificial sequence
  Primer
ggtgactcagctgagtcaccg

SEQ ID NO: 11900 - DNA, 21 bp, Artificial sequence
  Primer
acggactcagctgagtccgtg

SEQ ID NO: 11901 - DNA, 21 bp, Artificial sequence
  Primer
ccagactcagctgagtctggg

SEQ ID NO: 11902 - DNA, 21 bp, Artificial sequence
  Primer
tcggactcagctgagtccgag

SEQ ID NO: 11903 - DNA, 21 bp, Artificial sequence
  Primer
cctgactcagctgagtcaggg

SEQ ID NO: 11904 - DNA, 21 bp, Artificial sequence
  Primer
cacgactcagctgagtcgtgg

SEQ ID NO: 11905 - DNA, 21 bp, Artificial sequence
  Primer
gccgactcagctgagtcggct

SEQ ID NO: 11906 - DNA, 21 bp, Artificial sequence
  Primer
gccgactcagctgagtcggca

SEQ ID NO: 11907 - DNA, 21 bp, Artificial sequence
  Primer
cgagactcagctgagtctcgc

SEQ ID NO: 11908 - DNA, 21 bp, Artificial sequence
  Primer
cgtgactcagctgagtcacgc

SEQ ID NO: 11909 - DNA, 21 bp, Artificial sequence
  Primer
caggactcagctgagtcctgc

SEQ ID NO: 11910 - DNA, 21 bp, Artificial sequence
  Primer
ctggactcagctgagtccagc

SEQ ID NO: 11911 - DNA, 21 bp, Artificial sequence
  Primer
gaggactcagctgagtcctcg

SEQ ID NO: 11912 - DNA, 21 bp, Artificial sequence
  Primer
gtggactcagctgagtccacg

SEQ ID NO: 11913 - DNA, 21 bp, Artificial sequence
  Primer
accgactcagctgagtcggtg

SEQ ID NO: 11914 - DNA, 21 bp, Artificial sequence
  Primer
tccgactcagctgagtcggag

SEQ ID NO: 11915 - DNA, 21 bp, Artificial sequence
  Primer
cgggactcagctgagtcccgc

SEQ ID NO: 11916 - DNA, 21 bp, Artificial sequence
  Primer
agggactcagctgagtccctc

SEQ ID NO: 11917 - DNA, 21 bp, Artificial sequence
  Primer
tgggactcagctgagtcccac

SEQ ID NO: 11918 - DNA, 21 bp, Artificial sequence
  Primer
  misc_feature (1)..(3): n is a, c, g, or t
  misc_feature (18)..(21): n is a, c, g, or t
nnngactcaattgagtcnnnn

SEQ ID NO: 11919 - DNA, 21 bp, Artificial sequence
  Primer
gcggactcaattgagtccgcc

SEQ ID NO: 11920 - DNA, 21 bp, Artificial sequence
  Primer
gcggactcaattgagtccgct

SEQ ID NO: 11921 - DNA, 21 bp, Artificial sequence
  Primer
acggactcaattgagtccgtc

SEQ ID NO: 11922 - DNA, 21 bp, Artificial sequence
  Primer
gaggactcaattgagtcctcc

SEQ ID NO: 11923 - DNA, 21 bp, Artificial sequence
  Primer
gcagactcaattgagtctgcc

SEQ ID NO: 11924 - DNA, 21 bp, Artificial sequence
  Primer
gcggactcaattgagtccgca

SEQ ID NO: 11925 - DNA, 21 bp, Artificial sequence
  Primer
tcggactcaattgagtccgac

SEQ ID NO: 11926 - DNA, 21 bp, Artificial sequence
  Primer
gtggactcaattgagtccacc

SEQ ID NO: 11927 - DNA, 21 bp, Artificial sequence
  Primer
gctgactcaattgagtcagcc

SEQ ID NO: 11928 - DNA, 21 bp, Artificial sequence
  Primer
cccgactcaattgagtcgggc

SEQ ID NO: 11929 - DNA, 21 bp, Artificial sequence
  Primer
cccgactcaattgagtcgggt

SEQ ID NO: 11930 - DNA, 21 bp, Artificial sequence
  Primer
accgactcaattgagtcggtc

SEQ ID NO: 11931 - DNA, 21 bp, Artificial sequence
  Primer
cacgactcaattgagtcgtgc

SEQ ID NO: 11932 - DNA, 21 bp, Artificial sequence
  Primer
ccagactcaattgagtctggc

SEQ ID NO: 11933 - DNA, 21 bp, Artificial sequence
  Primer
cccgactcaattgagtcggga

SEQ ID NO: 11934 - DNA, 21 bp, Artificial sequence
  Primer
tccgactcaattgagtcggac

SEQ ID NO: 11935 - DNA, 21 bp, Artificial sequence
  Primer
cctgactcaattgagtcaggc

SEQ ID NO: 11936 - DNA, 21 bp, Artificial sequence
  Primer
ggcgactcaattgagtcgccc

SEQ ID NO: 11937 - DNA, 21 bp, Artificial sequence
  Primer
ggcgactcaattgagtcgcct

SEQ ID NO: 11938 - DNA, 21 bp, Artificial sequence
  Primer
agcgactcaattgagtcgctc

SEQ ID NO: 11939 - DNA, 21 bp, Artificial sequence
  Primer
gacgactcaattgagtcgtcc

SEQ ID NO: 11940 - DNA, 21 bp, Artificial sequence
  Primer
ggagactcaattgagtctccc

SEQ ID NO: 11941 - DNA, 21 bp, Artificial sequence
  Primer
ggcgactcaattgagtcgcca

SEQ ID NO: 11942 - DNA, 21 bp, Artificial sequence
  Primer
tgcgactcaattgagtcgcac

SEQ ID NO: 11943 - DNA, 21 bp, Artificial sequence
  Primer
ggtgactcaattgagtcaccc

SEQ ID NO: 11944 - DNA, 21 bp, Artificial sequence
  Primer
cgggactcaattgagtcccgt

SEQ ID NO: 11945 - DNA, 21 bp, Artificial sequence
  Primer
agggactcaattgagtccctg

SEQ ID NO: 11946 - DNA, 21 bp, Artificial sequence
  Primer
caggactcaattgagtcctgg

SEQ ID NO: 11947 - DNA, 21 bp, Artificial sequence
  Primer
cgagactcaattgagtctcgg

SEQ ID NO: 11948 - DNA, 21 bp, Artificial sequence
  Primer
cgggactcaattgagtcccga

SEQ ID NO: 11949 - DNA, 21 bp, Artificial sequence
  Primer
tgggactcaattgagtcccag

SEQ ID NO: 11950 - DNA, 21 bp, Artificial sequence
  Primer
ctggactcaattgagtccagg

SEQ ID NO: 11951 - DNA, 21 bp, Artificial sequence
  Primer
cgtgactcaattgagtcacgg

SEQ ID NO: 11952 - DNA, 21 bp, Artificial sequence
  Primer
ggcgactcaattgagtcgccg

SEQ ID NO: 11953 - DNA, 21 bp, Artificial sequence
  Primer
agcgactcaattgagtcgctg

SEQ ID NO: 11954 - DNA, 21 bp, Artificial sequence
  Primer
gacgactcaattgagtcgtcg

SEQ ID NO: 11955 - DNA, 21 bp, Artificial sequence
  Primer
ggagactcaattgagtctccg

SEQ ID NO: 11956 - DNA, 21 bp, Artificial sequence
  Primer
tgcgactcaattgagtcgcag

SEQ ID NO: 11957 - DNA, 21 bp, Artificial sequence
  Primer
ggtgactcaattgagtcaccg

SEQ ID NO: 11958 - DNA, 21 bp, Artificial sequence
  Primer
acggactcaattgagtccgtg

SEQ ID NO: 11959 - DNA, 21 bp, Artificial sequence
  Primer
ccagactcaattgagtctggg

SEQ ID NO: 11960 - DNA, 21 bp, Artificial sequence
  Primer
tcggactcaattgagtccgag

SEQ ID NO: 11961 - DNA, 21 bp, Artificial sequence
  Primer
cctgactcaattgagtcaggg

SEQ ID NO: 11962 - DNA, 21 bp, Artificial sequence
  Primer
cacgactcaattgagtcgtgg

SEQ ID NO: 11963 - DNA, 21 bp, Artificial sequence
  Primer
gccgactcaattgagtcggct

SEQ ID NO: 11964 - DNA, 21 bp, Artificial sequence
  Primer
gccgactcaattgagtcggca

SEQ ID NO: 11965 - DNA, 21 bp, Artificial sequence
  Primer
cgagactcaattgagtctcgc

SEQ ID NO: 11966 - DNA, 21 bp, Artificial sequence
  Primer
cgtgactcaattgagtcacgc

SEQ ID NO: 11967 - DNA, 21 bp, Artificial sequence
  Primer
caggactcaattgagtcctgc

SEQ ID NO: 11968 - DNA, 21 bp, Artificial sequence
  Primer
ctggactcaattgagtccagc

SEQ ID NO: 11969 - DNA, 21 bp, Artificial sequence
  Primer
gaggactcaattgagtcctcg

SEQ ID NO: 11970 - DNA, 21 bp, Artificial sequence
  Primer
gtggactcaattgagtccacg

SEQ ID NO: 11971 - DNA, 21 bp, Artificial sequence
  Primer
accgactcaattgagtcggtg

SEQ ID NO: 11972 - DNA, 21 bp, Artificial sequence
  Primer
tccgactcaattgagtcggag

SEQ ID NO: 11973 - DNA, 21 bp, Artificial sequence
  Primer
cgggactcaattgagtcccgc

SEQ ID NO: 11974 - DNA, 21 bp, Artificial sequence
  Primer
agggactcaattgagtccctc

SEQ ID NO: 11975 - DNA, 21 bp, Artificial sequence
  Primer
tgggactcaattgagtcccac

SEQ ID NO: 11976 - DNA, 21 bp, Artificial sequence
  Primer
  misc_feature (1)..(3): n is a, c, g, or t
  misc_feature (18)..(21): n is a, c, g, or t
nnngactctatagagtcnnnn

SEQ ID NO: 11977 - DNA, 21 bp, Artificial sequence
  Primer
gcggactctatagagtccgcc

SEQ ID NO: 11978 - DNA, 21 bp, Artificial sequence
  Primer
gcggactctatagagtccgct

SEQ ID NO: 11979 - DNA, 21 bp, Artificial sequence
  Primer
acggactctatagagtccgtc

SEQ ID NO: 11980 - DNA, 21 bp, Artificial sequence
  Primer
gaggactctatagagtcctcc

SEQ ID NO: 11981 - DNA, 21 bp, Artificial sequence
  Primer
gcagactctatagagtctgcc

SEQ ID NO: 11982 - DNA, 21 bp, Artificial sequence
  Primer
gcggactctatagagtccgca

SEQ ID NO: 11983 - DNA, 21 bp, Artificial sequence
  Primer
tcggactctatagagtccgac

SEQ ID NO: 11984 - DNA, 21 bp, Artificial sequence
  Primer
gtggactctatagagtccacc

SEQ ID NO: 11985 - DNA, 21 bp, Artificial sequence
  Primer
gctgactctatagagtcagcc

SEQ ID NO: 11986 - DNA, 21 bp, Artificial sequence
  Primer
cccgactctatagagtcgggc

SEQ ID NO: 11987 - DNA, 21 bp, Artificial sequence
  Primer
cccgactctatagagtcgggt

SEQ ID NO: 11988 - DNA, 21 bp, Artificial sequence
  Primer
accgactctatagagtcggtc

SEQ ID NO: 11989 - DNA, 21 bp, Artificial sequence
  Primer
cacgactctatagagtcgtgc

SEQ ID NO: 11990 - DNA, 21 bp, Artificial sequence
  Primer
ccagactctatagagtctggc

SEQ ID NO: 11991 - DNA, 21 bp, Artificial sequence
  Primer
cccgactctatagagtcggga

SEQ ID NO: 11992 - DNA, 21 bp, Artificial sequence
  Primer
tccgactctatagagtcggac

SEQ ID NO: 11993 - DNA, 21 bp, Artificial sequence
  Primer
cctgactctatagagtcaggc

SEQ ID NO: 11994 - DNA, 21 bp, Artificial sequence
  Primer
ggcgactctatagagtcgccc

SEQ ID NO: 11995 - DNA, 21 bp, Artificial sequence
  Primer
ggcgactctatagagtcgcct

SEQ ID NO: 11996 - DNA, 21 bp, Artificial sequence
  Primer
agcgactctatagagtcgctc

SEQ ID NO: 11997 - DNA, 21 bp, Artificial sequence
  Primer
gacgactctatagagtcgtcc

SEQ ID NO: 11998 - DNA, 21 bp, Artificial sequence
  Primer
ggagactctatagagtctccc

SEQ ID NO: 11999 - DNA, 21 bp, Artificial sequence
  Primer
ggcgactctatagagtcgcca

SEQ ID NO: 12000 - DNA, 21 bp, Artificial sequence
  Primer
tgcgactctatagagtcgcac

SEQ ID NO: 12001 - DNA, 21 bp, Artificial sequence
  Primer
ggtgactctatagagtcaccc

SEQ ID NO: 12002 - DNA, 21 bp, Artificial sequence
  Primer
cgggactctatagagtcccgt

SEQ ID NO: 12003 - DNA, 21 bp, Artificial sequence
  Primer
agggactctatagagtccctg

SEQ ID NO: 12004 - DNA, 21 bp, Artificial sequence
  Primer
caggactctatagagtcctgg

SEQ ID NO: 12005 - DNA, 21 bp, Artificial sequence
  Primer
cgagactctatagagtctcgg

SEQ ID NO: 12006 - DNA, 21 bp, Artificial sequence
  Primer
cgggactctatagagtcccga

SEQ ID NO: 12007 - DNA, 21 bp, Artificial sequence
  Primer
tgggactctatagagtcccag

SEQ ID NO: 12008 - DNA, 21 bp, Artificial sequence
  Primer
ctggactctatagagtccagg

SEQ ID NO: 12009 - DNA, 21 bp, Artificial sequence
  Primer
cgtgactctatagagtcacgg

SEQ ID NO: 12010 - DNA, 21 bp, Artificial sequence
  Primer
ggcgactctatagagtcgccg

SEQ ID NO: 12011 - DNA, 21 bp, Artificial sequence
  Primer
agcgactctatagagtcgctg

SEQ ID NO: 12012 - DNA, 21 bp, Artificial sequence
  Primer
gacgactctatagagtcgtcg

SEQ ID NO: 12013 - DNA, 21 bp, Artificial sequence
  Primer
ggagactctatagagtctccg

SEQ ID NO: 12014 - DNA, 21 bp, Artificial sequence
  Primer
tgcgactctatagagtcgcag

SEQ ID NO: 12015 - DNA, 21 bp, Artificial sequence
  Primer
ggtgactctatagagtcaccg

SEQ ID NO: 12016 - DNA, 21 bp, Artificial sequence
  Primer
acggactctatagagtccgtg

SEQ ID NO: 12017 - DNA, 21 bp, Artificial sequence
  Primer
ccagactctatagagtctggg

SEQ ID NO: 12018 - DNA, 21 bp, Artificial sequence
  Primer
tcggactctatagagtccgag

SEQ ID NO: 12019 - DNA, 21 bp, Artificial sequence
  Primer
cctgactctatagagtcaggg

SEQ ID NO: 12020 - DNA, 21 bp, Artificial sequence
  Primer
cacgactctatagagtcgtgg

SEQ ID NO: 12021 - DNA, 21 bp, Artificial sequence
  Primer
gccgactctatagagtcggct

SEQ ID NO: 12022 - DNA, 21 bp, Artificial sequence
  Primer
gccgactctatagagtcggca

SEQ ID NO: 12023 - DNA, 21 bp, Artificial sequence
  Primer
cgagactctatagagtctcgc

SEQ ID NO: 12024 - DNA, 21 bp, Artificial sequence
  Primer
cgtgactctatagagtcacgc

SEQ ID NO: 12025 - DNA, 21 bp, Artificial sequence
  Primer
caggactctatagagtcctgc

SEQ ID NO: 12026 - DNA, 21 bp, Artificial sequence
  Primer
ctggactctatagagtccagc

SEQ ID NO: 12027 - DNA, 21 bp, Artificial sequence
  Primer
gaggactctatagagtcctcg

SEQ ID NO: 12028 - DNA, 21 bp, Artificial sequence
  Primer
gtggactctatagagtccacg

SEQ ID NO: 12029 - DNA, 21 bp, Artificial sequence
  Primer
accgactctatagagtcggtg

SEQ ID NO: 12030 - DNA, 21 bp, Artificial sequence
  Primer
tccgactctatagagtcggag

SEQ ID NO: 12031 - DNA, 21 bp, Artificial sequence
  Primer
cgggactctatagagtcccgc

SEQ ID NO: 12032 - DNA, 21 bp, Artificial sequence
  Primer
agggactctatagagtccctc

SEQ ID NO: 12033 - DNA, 21 bp, Artificial sequence
  Primer
tgggactctatagagtcccac

SEQ ID NO: 12034 - DNA, 21 bp, Artificial sequence
  Primer
  misc_feature (1)..(3): n is a, c, g, or t
  misc_feature (18)..(21): n is a, c, g, or t
nnngactcatatgagtcnnnn

SEQ ID NO: 12035 - DNA, 21 bp, Artificial sequence
  Primer
gcggactcatatgagtccgcc

SEQ ID NO: 12036 - DNA, 21 bp, Artificial sequence
  Primer
gcggactcatatgagtccgct

SEQ ID NO: 12037 - DNA, 21 bp, Artificial sequence
  Primer
acggactcatatgagtccgtc

SEQ ID NO: 12038 - DNA, 21 bp, Artificial sequence
  Primer
gaggactcatatgagtcctcc

SEQ ID NO: 12039 - DNA, 21 bp, Artificial sequence
  Primer
gcagactcatatgagtctgcc

SEQ ID NO: 12040 - DNA, 21 bp, Artificial sequence
  Primer
gcggactcatatgagtccgca

SEQ ID NO: 12041 - DNA, 21 bp, Artificial sequence
  Primer
tcggactcatatgagtccgac

SEQ ID NO: 12042 - DNA, 21 bp, Artificial sequence
  Primer
gtggactcatatgagtccacc

SEQ ID NO: 12043 - DNA, 21 bp, Artificial sequence
  Primer
gctgactcatatgagtcagcc

SEQ ID NO: 12044 - DNA, 21 bp, Artificial sequence
  Primer
cccgactcatatgagtcgggc

SEQ ID NO: 12045 - DNA, 21 bp, Artificial sequence
  Primer
cccgactcatatgagtcgggt

SEQ ID NO: 12046 - DNA, 21 bp, Artificial sequence
  Primer
accgactcatatgagtcggtc

SEQ ID NO: 12047 - DNA, 21 bp, Artificial sequence
  Primer
cacgactcatatgagtcgtgc

SEQ ID NO: 12048 - DNA, 21 bp, Artificial sequence
  Primer
ccagactcatatgagtctggc

SEQ ID NO: 12049 - DNA, 21 bp, Artificial sequence
  Primer
cccgactcatatgagtcggga

SEQ ID NO: 12050 - DNA, 21 bp, Artificial sequence
  Primer
tccgactcatatgagtcggac

SEQ ID NO: 12051 - DNA, 21 bp, Artificial sequence
  Primer
cctgactcatatgagtcaggc

SEQ ID NO: 12052 - DNA, 21 bp, Artificial sequence
  Primer
ggcgactcatatgagtcgccc

SEQ ID NO: 12053 - DNA, 21 bp, Artificial sequence
  Primer
ggcgactcatatgagtcgcct

SEQ ID NO: 12054 - DNA, 21 bp, Artificial sequence
  Primer
agcgactcatatgagtcgctc

SEQ ID NO: 12055 - DNA, 21 bp, Artificial sequence
  Primer
gacgactcatatgagtcgtcc

SEQ ID NO: 12056 - DNA, 21 bp, Artificial sequence
  Primer
ggagactcatatgagtctccc

SEQ ID NO: 12057 - DNA, 21 bp, Artificial sequence
  Primer
ggcgactcatatgagtcgcca

SEQ ID NO: 12058 - DNA, 21 bp, Artificial sequence
  Primer
tgcgactcatatgagtcgcac

SEQ ID NO: 12059 - DNA, 21 bp, Artificial sequence
  Primer
ggtgactcatatgagtcaccc

SEQ ID NO: 12060 - DNA, 21 bp, Artificial sequence
  Primer
cgggactcatatgagtcccgt

SEQ ID NO: 12061 - DNA, 21 bp, Artificial sequence
  Primer
agggactcatatgagtccctg

SEQ ID NO: 12062 - DNA, 21 bp, Artificial sequence
  Primer
caggactcatatgagtcctgg

SEQ ID NO: 12063 - DNA, 21 bp, Artificial sequence
  Primer
cgagactcatatgagtctcgg

SEQ ID NO: 12064 - DNA, 21 bp, Artificial sequence
  Primer
cgggactcatatgagtcccga

SEQ ID NO: 12065 - DNA, 21 bp, Artificial sequence
  Primer
tgggactcatatgagtcccag

SEQ ID NO: 12066 - DNA, 21 bp, Artificial sequence
  Primer
ctggactcatatgagtccagg

SEQ ID NO: 12067 - DNA, 21 bp, Artificial sequence
  Primer
cgtgactcatatgagtcacgg

SEQ ID NO: 12068 - DNA, 21 bp, Artificial sequence
  Primer
ggcgactcatatgagtcgccg

SEQ ID NO: 12069 - DNA, 21 bp, Artificial sequence
  Primer
agcgactcatatgagtcgctg

SEQ ID NO: 12070 - DNA, 21 bp, Artificial sequence
  Primer
gacgactcatatgagtcgtcg

SEQ ID NO: 12071 - DNA, 21 bp, Artificial sequence
  Primer
ggagactcatatgagtctccg

SEQ ID NO: 12072 - DNA, 21 bp, Artificial sequence
  Primer
tgcgactcatatgagtcgcag

SEQ ID NO: 12073 - DNA, 21 bp, Artificial sequence
  Primer
ggtgactcatatgagtcaccg

SEQ ID NO: 12074 - DNA, 21 bp, Artificial sequence
  Primer
acggactcatatgagtccgtg

SEQ ID NO: 12075 - DNA, 21 bp, Artificial sequence
  Primer
ccagactcatatgagtctggg

SEQ ID NO: 12076 - DNA, 21 bp, Artificial sequence
  Primer
tcggactcatatgagtccgag

SEQ ID NO: 12077 - DNA, 21 bp, Artificial sequence
  Primer
cctgactcatatgagtcaggg

SEQ ID NO: 12078 - DNA, 21 bp, Artificial sequence
  Primer
cacgactcatatgagtcgtgg

SEQ ID NO: 12079 - DNA, 21 bp, Artificial sequence
  Primer
gccgactcatatgagtcggct

SEQ ID NO: 12080 - DNA, 21 bp, Artificial sequence
  Primer
gccgactcatatgagtcggca

SEQ ID NO: 12081 - DNA, 21 bp, Artificial sequence
  Primer
cgagactcatatgagtctcgc

SEQ ID NO: 12082 - DNA, 21 bp, Artificial sequence
  Primer
cgtgactcatatgagtcacgc

SEQ ID NO: 12083 - DNA, 21 bp, Artificial sequence
  Primer
caggactcatatgagtcctgc

SEQ ID NO: 12084 - DNA, 21 bp, Artificial sequence
  Primer
ctggactcatatgagtccagc

SEQ ID NO: 12085 - DNA, 21 bp, Artificial sequence
  Primer
gaggactcatatgagtcctcg

SEQ ID NO: 12086 - DNA, 21 bp, Artificial sequence
  Primer
gtggactcatatgagtccacg

SEQ ID NO: 12087 - DNA, 21 bp, Artificial sequence
  Primer
accgactcatatgagtcggtg

SEQ ID NO: 12088 - DNA, 21 bp, Artificial sequence
  Primer
tccgactcatatgagtcggag

SEQ ID NO: 12089 - DNA, 21 bp, Artificial sequence
  Primer
cgggactcatatgagtcccgc

SEQ ID NO: 12090 - DNA, 21 bp, Artificial sequence
  Primer
agggactcatatgagtccctc

SEQ ID NO: 12091 - DNA, 21 bp, Artificial sequence
  Primer
tgggactcatatgagtcccac

SEQ ID NO: 12092 - DNA, 21 bp, Artificial sequence
  Primer
  misc_feature (1)..(3): n is a, c, g, or t
  misc_feature (18)..(21): n is a, c, g, or t
nnngactcttaagagtcnnnn

SEQ ID NO: 12093 - DNA, 21 bp, Artificial sequence
  Primer
gcggactcttaagagtccgcc

SEQ ID NO: 12094 - DNA, 21 bp, Artificial sequence
  Primer
gcggactcttaagagtccgct

SEQ ID NO: 12095 - DNA, 21 bp, Artificial sequence
  Primer
acggactcttaagagtccgtc

SEQ ID NO: 12096 - DNA, 21 bp, Artificial sequence
  Primer
gaggactcttaagagtcctcc

SEQ ID NO: 12097 - DNA, 21 bp, Artificial sequence
  Primer
gcagactcttaagagtctgcc

SEQ ID NO: 12098 - DNA, 21 bp, Artificial sequence
  Primer
gcggactcttaagagtccgca

SEQ ID NO: 12099 - DNA, 21 bp, Artificial sequence
  Primer
tcggactcttaagagtccgac

SEQ ID NO: 12100 - DNA, 21 bp, Artificial sequence
  Primer
gtggactcttaagagtccacc

SEQ ID NO: 12101 - DNA, 21 bp, Artificial sequence
  Primer
gctgactcttaagagtcagcc

SEQ ID NO: 12102 - DNA, 21 bp, Artificial sequence
  Primer
cccgactcttaagagtcgggc

SEQ ID NO: 12103 - DNA, 21 bp, Artificial sequence
  Primer
cccgactcttaagagtcgggt

SEQ ID NO: 12104 - DNA, 21 bp, Artificial sequence
  Primer
accgactcttaagagtcggtc

SEQ ID NO: 12105 - DNA, 21 bp, Artificial sequence
  Primer
cacgactcttaagagtcgtgc

SEQ ID NO: 12106 - DNA, 21 bp, Artificial sequence
  Primer
ccagactcttaagagtctggc

SEQ ID NO: 12107 - DNA, 21 bp, Artificial sequence
  Primer
cccgactcttaagagtcggga

SEQ ID NO: 12108 - DNA, 21 bp, Artificial sequence
  Primer
tccgactcttaagagtcggac

SEQ ID NO: 12109 - DNA, 21 bp, Artificial sequence
  Primer
cctgactcttaagagtcaggc

SEQ ID NO: 12110 - DNA, 21 bp, Artificial sequence
  Primer
ggcgactcttaagagtcgccc

SEQ ID NO: 12111 - DNA, 21 bp, Artificial sequence
  Primer
ggcgactcttaagagtcgcct

SEQ ID NO: 12112 - DNA, 21 bp, Artificial sequence
  Primer
agcgactcttaagagtcgctc

SEQ ID NO: 12113 - DNA, 21 bp, Artificial sequence
  Primer
gacgactcttaagagtcgtcc

SEQ ID NO: 12114 - DNA, 21 bp, Artificial sequence
  Primer
ggagactcttaagagtctccc

SEQ ID NO: 12115 - DNA, 21 bp, Artificial sequence
  Primer
ggcgactcttaagagtcgcca

SEQ ID NO: 12116 - DNA, 21 bp, Artificial sequence
  Primer
tgcgactcttaagagtcgcac

SEQ ID NO: 12117 - DNA, 21 bp, Artificial sequence
  Primer
ggtgactcttaagagtcaccc

SEQ ID NO: 12118 - DNA, 21 bp, Artificial sequence
  Primer
cgggactcttaagagtcccgt

SEQ ID NO: 12119 - DNA, 21 bp, Artificial sequence
  Primer
agggactcttaagagtccctg

SEQ ID NO: 12120 - DNA, 21 bp, Artificial sequence
  Primer
caggactcttaagagtcctgg

SEQ ID NO: 12121 - DNA, 21 bp, Artificial sequence
  Primer
cgagactcttaagagtctcgg

SEQ ID NO: 12122 - DNA, 21 bp, Artificial sequence
  Primer
cgggactcttaagagtcccga

SEQ ID NO: 12123 - DNA, 21 bp, Artificial sequence
  Primer
tgggactcttaagagtcccag

SEQ ID NO: 12124 - DNA, 21 bp, Artificial sequence
  Primer
ctggactcttaagagtccagg

SEQ ID NO: 12125 - DNA, 21 bp, Artificial sequence
  Primer
cgtgactcttaagagtcacgg

SEQ ID NO: 12126 - DNA, 21 bp, Artificial sequence
  Primer
ggcgactcttaagagtcgccg

SEQ ID NO: 12127 - DNA, 21 bp, Artificial sequence
  Primer
agcgactcttaagagtcgctg

SEQ ID NO: 12128 - DNA, 21 bp, Artificial sequence
  Primer
gacgactcttaagagtcgtcg

SEQ ID NO: 12129 - DNA, 21 bp, Artificial sequence
  Primer
ggagactcttaagagtctccg

SEQ ID NO: 12130 - DNA, 21 bp, Artificial sequence
  Primer
tgcgactcttaagagtcgcag

SEQ ID NO: 12131 - DNA, 21 bp, Artificial sequence
  Primer
ggtgactcttaagagtcaccg

SEQ ID NO: 12132 - DNA, 21 bp, Artificial sequence
  Primer
acggactcttaagagtccgtg

SEQ ID NO: 12133 - DNA, 21 bp, Artificial sequence
  Primer
ccagactcttaagagtctggg

SEQ ID NO: 12134 - DNA, 21 bp, Artificial sequence
  Primer
tcggactcttaagagtccgag

SEQ ID NO: 12135 - DNA, 21 bp, Artificial sequence
  Primer
cctgactcttaagagtcaggg

SEQ ID NO: 12136 - DNA, 21 bp, Artificial sequence
  Primer
cacgactcttaagagtcgtgg

SEQ ID NO: 12137 - DNA, 21 bp, Artificial sequence
  Primer
gccgactcttaagagtcggct

SEQ ID NO: 12138 - DNA, 21 bp, Artificial sequence
  Primer
gccgactcttaagagtcggca

SEQ ID NO: 12139 - DNA, 21 bp, Artificial sequence
  Primer
cgagactcttaagagtctcgc

SEQ ID NO: 12140 - DNA, 21 bp, Artificial sequence
  Primer
cgtgactcttaagagtcacgc

SEQ ID NO: 12141 - DNA, 21 bp, Artificial sequence
  Primer
caggactcttaagagtcctgc

SEQ ID NO: 12142 - DNA, 21 bp, Artificial sequence
  Primer
ctggactcttaagagtccagc

SEQ ID NO: 12143 - DNA, 21 bp, Artificial sequence
  Primer
gaggactcttaagagtcctcg

SEQ ID NO: 12144 - DNA, 21 bp, Artificial sequence
  Primer
gtggactcttaagagtccacg

SEQ ID NO: 12145 - DNA, 21 bp, Artificial sequence
  Primer
accgactcttaagagtcggtg

SEQ ID NO: 12146 - DNA, 21 bp, Artificial sequence
  Primer
tccgactcttaagagtcggag

SEQ ID NO: 12147 - DNA, 21 bp, Artificial sequence
  Primer
cgggactcttaagagtcccgc

SEQ ID NO: 12148 - DNA, 21 bp, Artificial sequence
  Primer
agggactcttaagagtccctc

SEQ ID NO: 12149 - DNA, 21 bp, Artificial sequence
  Primer
tgggactcttaagagtcccac

SEQ ID NO: 12150 - DNA, 20 bp, Artificial sequence
  Primer
  misc_feature (1)..(2): n is a, c, g, or t
  misc_feature (17)..(20): n is a, c, g, or t
nngactccgcggagtcnnnn

SEQ ID NO: 12151 - DNA, 20 bp, Artificial sequence
  Primer
cggactccgcggagtccgcc

SEQ ID NO: 12152 - DNA, 20 bp, Artificial sequence
  Primer
cggactccgcggagtccgct

SEQ ID NO: 12153 - DNA, 20 bp, Artificial sequence
  Primer
cggactccgcggagtccgtc

SEQ ID NO: 12154 - DNA, 20 bp, Artificial sequence
  Primer
aggactccgcggagtcctcc

SEQ ID NO: 12155 - DNA, 20 bp, Artificial sequence
  Primer
cagactccgcggagtctgcc

SEQ ID NO: 12156 - DNA, 20 bp, Artificial sequence
  Primer
cggactccgcggagtccgca

SEQ ID NO: 12157 - DNA, 20 bp, Artificial sequence
  Primer
cggactccgcggagtccgac

SEQ ID NO: 12158 - DNA, 20 bp, Artificial sequence
  Primer
tggactccgcggagtccacc

SEQ ID NO: 12159 - DNA, 20 bp, Artificial sequence
  Primer
ctgactccgcggagtcagcc

SEQ ID NO: 12160 - DNA, 20 bp, Artificial sequence
  Primer
ccgactccgcggagtcgggc

SEQ ID NO: 12161 - DNA, 20 bp, Artificial sequence
  Primer
ccgactccgcggagtcgggt

SEQ ID NO: 12162 - DNA, 20 bp, Artificial sequence
  Primer
ccgactccgcggagtcggtc

SEQ ID NO: 12163 - DNA, 20 bp, Artificial sequence
  Primer
acgactccgcggagtcgtgc

SEQ ID NO: 12164 - DNA, 20 bp, Artificial sequence
  Primer
cagactccgcggagtctggc

SEQ ID NO: 12165 - DNA, 20 bp, Artificial sequence
  Primer
ccgactccgcggagtcggga

SEQ ID NO: 12166 - DNA, 20 bp, Artificial sequence
  Primer
ccgactccgcggagtcggac

SEQ ID NO: 12167 - DNA, 20 bp, Artificial sequence
  Primer
ctgactccgcggagtcaggc

SEQ ID NO: 12168 - DNA, 20 bp, Artificial sequence
  Primer
gcgactccgcggagtcgccc

SEQ ID NO: 12169 - DNA, 20 bp, Artificial sequence
  Primer
gcgactccgcggagtcgcct

SEQ ID NO: 12170 - DNA, 20 bp, Artificial sequence
  Primer
gcgactccgcggagtcgctc

SEQ ID NO: 12171 - DNA, 20 bp, Artificial sequence
  Primer
acgactccgcggagtcgtcc

SEQ ID NO: 12172 - DNA, 20 bp, Artificial sequence
  Primer
gagactccgcggagtctccc

SEQ ID NO: 12173 - DNA, 20 bp, Artificial sequence
  Primer
gcgactccgcggagtcgcca

SEQ ID NO: 12174 - DNA, 20 bp, Artificial sequence
  Primer
gcgactccgcggagtcgcac

SEQ ID NO: 12175 - DNA, 20 bp, Artificial sequence
  Primer
gtgactccgcggagtcaccc

SEQ ID NO: 12176 - DNA, 20 bp, Artificial sequence
  Primer
gggactccgcggagtcccgt

SEQ ID NO: 12177 - DNA, 20 bp, Artificial sequence
  Primer
gggactccgcggagtccctg

SEQ ID NO: 12178 - DNA, 20 bp, Artificial sequence
  Primer
aggactccgcggagtcctgg

SEQ ID NO: 12179 - DNA, 20 bp, Artificial sequence
  Primer
gagactccgcggagtctcgg

SEQ ID NO: 12180 - DNA, 20 bp, Artificial sequence
  Primer
gggactccgcggagtcccga

SEQ ID NO: 12181 - DNA, 20 bp, Artificial sequence
  Primer
gggactccgcggagtcccag

SEQ ID NO: 12182 - DNA, 20 bp, Artificial sequence
  Primer
tggactccgcggagtccagg

SEQ ID NO: 12183 - DNA, 20 bp, Artificial sequence
  Primer
gtgactccgcggagtcacgg

SEQ ID NO: 12184 - DNA, 20 bp, Artificial sequence
  Primer
gcgactccgcggagtcgccg

SEQ ID NO: 12185 - DNA, 20 bp, Artificial sequence
  Primer
gcgactccgcggagtcgctg

SEQ ID NO: 12186 - DNA, 20 bp, Artificial sequence
  Primer
acgactccgcggagtcgtcg

SEQ ID NO: 12187 - DNA, 20 bp, Artificial sequence
  Primer
gagactccgcggagtctccg

SEQ ID NO: 12188 - DNA, 20 bp, Artificial sequence
  Primer
gcgactccgcggagtcgcag

SEQ ID NO: 12189 - DNA, 20 bp, Artificial sequence
  Primer
gtgactccgcggagtcaccg

SEQ ID NO: 12190 - DNA, 20 bp, Artificial sequence
  Primer
cggactccgcggagtccgtg

SEQ ID NO: 12191 - DNA, 20 bp, Artificial sequence
  Primer
cagactccgcggagtctggg

SEQ ID NO: 12192 - DNA, 20 bp, Artificial sequence
  Primer
cggactccgcggagtccgag

SEQ ID NO: 12193 - DNA, 20 bp, Artificial sequence
  Primer
ctgactccgcggagtcaggg

SEQ ID NO: 12194 - DNA, 20 bp, Artificial sequence
  Primer
acgactccgcggagtcgtgg

SEQ ID NO: 12195 - DNA, 20 bp, Artificial sequence
  Primer
ccgactccgcggagtcggct

SEQ ID NO: 12196 - DNA, 20 bp, Artificial sequence
  Primer
ccgactccgcggagtcggca

SEQ ID NO: 12197 - DNA, 20 bp, Artificial sequence
  Primer
gagactccgcggagtctcgc

SEQ ID NO: 12198 - DNA, 20 bp, Artificial sequence
  Primer
gtgactccgcggagtcacgc

SEQ ID NO: 12199 - DNA, 20 bp, Artificial sequence
  Primer
aggactccgcggagtcctgc

SEQ ID NO: 12200 - DNA, 20 bp, Artificial sequence
  Primer
tggactccgcggagtccagc

SEQ ID NO: 12201 - DNA, 20 bp, Artificial sequence
  Primer
aggactccgcggagtcctcg

SEQ ID NO: 12202 - DNA, 20 bp, Artificial sequence
  Primer
tggactccgcggagtccacg

SEQ ID NO: 12203 - DNA, 20 bp, Artificial sequence
  Primer
ccgactccgcggagtcggtg

SEQ ID NO: 12204 - DNA, 20 bp, Artificial sequence
  Primer
ccgactccgcggagtcggag

SEQ ID NO: 12205 - DNA, 20 bp, Artificial sequence
  Primer
gggactccgcggagtcccgc

SEQ ID NO: 12206 - DNA, 20 bp, Artificial sequence
  Primer
gggactccgcggagtccctc

SEQ ID NO: 12207 - DNA, 20 bp, Artificial sequence
  Primer
gggactccgcggagtcccac

SEQ ID NO: 12208 - DNA, 20 bp, Artificial sequence
  Primer
  misc_feature (1)..(2): n is a, c, g, or t
  misc_feature (17)..(20): n is a, c, g, or t
nngactctgcagagtcnnnn

SEQ ID NO: 12209 - DNA, 20 bp, Artificial sequence
  Primer
cggactctgcagagtccgcc

SEQ ID NO: 12210 - DNA, 20 bp, Artificial sequence
  Primer
cggactctgcagagtccgct

SEQ ID NO: 12211 - DNA, 20 bp, Artificial sequence
  Primer
cggactctgcagagtccgtc

SEQ ID NO: 12212 - DNA, 20 bp, Artificial sequence
  Primer
aggactctgcagagtcctcc

SEQ ID NO: 12213 - DNA, 20 bp, Artificial sequence
  Primer
cagactctgcagagtctgcc

SEQ ID NO: 12214 - DNA, 20 bp, Artificial sequence
  Primer
cggactctgcagagtccgca

SEQ ID NO: 12215 - DNA, 20 bp, Artificial sequence
  Primer
cggactctgcagagtccgac

SEQ ID NO: 12216 - DNA, 20 bp, Artificial sequence
  Primer
tggactctgcagagtccacc

SEQ ID NO: 12217 - DNA, 20 bp, Artificial sequence
  Primer
ctgactctgcagagtcagcc

SEQ ID NO: 12218 - DNA, 20 bp, Artificial sequence
  Primer
ccgactctgcagagtcgggc

SEQ ID NO: 12219 - DNA, 20 bp, Artificial sequence
  Primer
ccgactctgcagagtcgggt

SEQ ID NO: 12220 - DNA, 20 bp, Artificial sequence
  Primer
ccgactctgcagagtcggtc

SEQ ID NO: 12221 - DNA, 20 bp, Artificial sequence
  Primer
acgactctgcagagtcgtgc

SEQ ID NO: 12222 - DNA, 20 bp, Artificial sequence
  Primer
cagactctgcagagtctggc

SEQ ID NO: 12223 - DNA, 20 bp, Artificial sequence
  Primer
ccgactctgcagagtcggga

SEQ ID NO: 12224 - DNA, 20 bp, Artificial sequence
  Primer
ccgactctgcagagtcggac

SEQ ID NO: 12225 - DNA, 20 bp, Artificial sequence
  Primer
ctgactctgcagagtcaggc

SEQ ID NO: 12226 - DNA, 20 bp, Artificial sequence
  Primer
gcgactctgcagagtcgccc

SEQ ID NO: 12227 - DNA, 20 bp, Artificial sequence
  Primer
gcgactctgcagagtcgcct

SEQ ID NO: 12228 - DNA, 20 bp, Artificial sequence
  Primer
gcgactctgcagagtcgctc

SEQ ID NO: 12229 - DNA, 20 bp, Artificial sequence
  Primer
acgactctgcagagtcgtcc

SEQ ID NO: 12230 - DNA, 20 bp, Artificial sequence
  Primer
gagactctgcagagtctccc

SEQ ID NO: 12231 - DNA, 20 bp, Artificial sequence
  Primer
gcgactctgcagagtcgcca

SEQ ID NO: 12232 - DNA, 20 bp, Artificial sequence
  Primer
gcgactctgcagagtcgcac

SEQ ID NO: 12233 - DNA, 20 bp, Artificial sequence
  Primer
gtgactctgcagagtcaccc

SEQ ID NO: 12234 - DNA, 20 bp, Artificial sequence
  Primer
gggactctgcagagtcccgt

SEQ ID NO: 12235 - DNA, 20 bp, Artificial sequence
  Primer
gggactctgcagagtccctg

SEQ ID NO: 12236 - DNA, 20 bp, Artificial sequence
  Primer
aggactctgcagagtcctgg

SEQ ID NO: 12237 - DNA, 20 bp, Artificial sequence
  Primer
gagactctgcagagtctcgg

SEQ ID NO: 12238 - DNA, 20 bp, Artificial sequence
  Primer
gggactctgcagagtcccga

SEQ ID NO: 12239 - DNA, 20 bp, Artificial sequence
  Primer
gggactctgcagagtcccag

SEQ ID NO: 12240 - DNA, 20 bp, Artificial sequence
  Primer
tggactctgcagagtccagg

SEQ ID NO: 12241 - DNA, 20 bp, Artificial sequence
  Primer
gtgactctgcagagtcacgg

SEQ ID NO: 12242 - DNA, 20 bp, Artificial sequence
  Primer
gcgactctgcagagtcgccg

SEQ ID NO: 12243 - DNA, 20 bp, Artificial sequence
  Primer
gcgactctgcagagtcgctg

SEQ ID NO: 12244 - DNA, 20 bp, Artificial sequence
  Primer
acgactctgcagagtcgtcg

SEQ ID NO: 12245 - DNA, 20 bp, Artificial sequence
  Primer
gagactctgcagagtctccg

SEQ ID NO: 12246 - DNA, 20 bp, Artificial sequence
  Primer
gcgactctgcagagtcgcag

SEQ ID NO: 12247 - DNA, 20 bp, Artificial sequence
  Primer
gtgactctgcagagtcaccg

SEQ ID NO: 12248 - DNA, 20 bp, Artificial sequence
  Primer
cggactctgcagagtccgtg

SEQ ID NO: 12249 - DNA, 20 bp, Artificial sequence
  Primer
cagactctgcagagtctggg

SEQ ID NO: 12250 - DNA, 20 bp, Artificial sequence
  Primer
cggactctgcagagtccgag

SEQ ID NO: 12251 - DNA, 20 bp, Artificial sequence
  Primer
ctgactctgcagagtcaggg

SEQ ID NO: 12252 - DNA, 20 bp, Artificial sequence
  Primer
acgactctgcagagtcgtgg

SEQ ID NO: 12253 - DNA, 20 bp, Artificial sequence
  Primer
ccgactctgcagagtcggct

SEQ ID NO: 12254 - DNA, 20 bp, Artificial sequence
  Primer
ccgactctgcagagtcggca

SEQ ID NO: 12255 - DNA, 20 bp, Artificial sequence
  Primer
gagactctgcagagtctcgc

SEQ ID NO: 12256 - DNA, 20 bp, Artificial sequence
  Primer
gtgactctgcagagtcacgc

SEQ ID NO: 12257 - DNA, 20 bp, Artificial sequence
  Primer
aggactctgcagagtcctgc

SEQ ID NO: 12258 - DNA, 20 bp, Artificial sequence
  Primer
tggactctgcagagtccagc

SEQ ID NO: 12259 - DNA, 20 bp, Artificial sequence
  Primer
aggactctgcagagtcctcg

SEQ ID NO: 12260 - DNA, 20 bp, Artificial sequence
  Primer
tggactctgcagagtccacg

SEQ ID NO: 12261 - DNA, 20 bp, Artificial sequence
  Primer
ccgactctgcagagtcggtg

SEQ ID NO: 12262 - DNA, 20 bp, Artificial sequence
  Primer
ccgactctgcagagtcggag

SEQ ID NO: 12263 - DNA, 20 bp, Artificial sequence
  Primer
gggactctgcagagtcccgc

SEQ ID NO: 12264 - DNA, 20 bp, Artificial sequence
  Primer
gggactctgcagagtccctc

SEQ ID NO: 12265 - DNA, 20 bp, Artificial sequence
  Primer
gggactctgcagagtcccac

SEQ ID NO: 12266 - DNA, 20 bp, Artificial sequence
  Primer
  misc_feature (1)..(2): n is a, c, g, or t
  misc_feature (17)..(20): n is a, c, g, or t
nngactcgcgcgagtcnnnn

SEQ ID NO: 12267 - DNA, 20 bp, Artificial sequence
  Primer
cggactcgcgcgagtccgcc

SEQ ID NO: 12268 - DNA, 20 bp, Artificial sequence
  Primer
cggactcgcgcgagtccgct

SEQ ID NO: 12269 - DNA, 20 bp, Artificial sequence
  Primer
cggactcgcgcgagtccgtc

SEQ ID NO: 12270 - DNA, 20 bp, Artificial sequence
  Primer
aggactcgcgcgagtcctcc

SEQ ID NO: 12271 - DNA, 20 bp, Artificial sequence
  Primer
cagactcgcgcgagtctgcc

SEQ ID NO: 12272 - DNA, 20 bp, Artificial sequence
  Primer
cggactcgcgcgagtccgca

SEQ ID NO: 12273 - DNA, 20 bp, Artificial sequence
  Primer
cggactcgcgcgagtccgac

SEQ ID NO: 12274 - DNA, 20 bp, Artificial sequence
  Primer
tggactcgcgcgagtccacc

SEQ ID NO: 12275 - DNA, 20 bp, Artificial sequence
  Primer
ctgactcgcgcgagtcagcc

SEQ ID NO: 12276 - DNA, 20 bp, Artificial sequence
  Primer
ccgactcgcgcgagtcgggc

SEQ ID NO: 12277 - DNA, 20 bp, Artificial sequence
  Primer
ccgactcgcgcgagtcgggt

SEQ ID NO: 12278 - DNA, 20 bp, Artificial sequence
  Primer
ccgactcgcgcgagtcggtc

SEQ ID NO: 12279 - DNA, 20 bp, Artificial sequence
  Primer
acgactcgcgcgagtcgtgc

SEQ ID NO: 12280 - DNA, 20 bp, Artificial sequence
  Primer
cagactcgcgcgagtctggc

SEQ ID NO: 12281 - DNA, 20 bp, Artificial sequence
  Primer
ccgactcgcgcgagtcggga

SEQ ID NO: 12282 - DNA, 20 bp, Artificial sequence
  Primer
ccgactcgcgcgagtcggac

SEQ ID NO: 12283 - DNA, 20 bp, Artificial sequence
  Primer
ctgactcgcgcgagtcaggc

SEQ ID NO: 12284 - DNA, 20 bp, Artificial sequence
  Primer
gcgactcgcgcgagtcgccc

SEQ ID NO: 12285 - DNA, 20 bp, Artificial sequence
  Primer
gcgactcgcgcgagtcgcct

SEQ ID NO: 12286 - DNA, 20 bp, Artificial sequence
  Primer
gcgactcgcgcgagtcgctc

SEQ ID NO: 12287 - DNA, 20 bp, Artificial sequence
  Primer
acgactcgcgcgagtcgtcc

SEQ ID NO: 12288 - DNA, 20 bp, Artificial sequence
  Primer
gagactcgcgcgagtctccc

SEQ ID NO: 12289 - DNA, 20 bp, Artificial sequence
  Primer
gcgactcgcgcgagtcgcca

SEQ ID NO: 12290 - DNA, 20 bp, Artificial sequence
  Primer
gcgactcgcgcgagtcgcac

SEQ ID NO: 12291 - DNA, 20 bp, Artificial sequence
  Primer
gtgactcgcgcgagtcaccc

SEQ ID NO: 12292 - DNA, 20 bp, Artificial sequence
  Primer
gggactcgcgcgagtcccgt

SEQ ID NO: 12293 - DNA, 20 bp, Artificial sequence
  Primer
gggactcgcgcgagtccctg

SEQ ID NO: 12294 - DNA, 20 bp, Artificial sequence
  Primer
aggactcgcgcgagtcctgg

SEQ ID NO: 12295 - DNA, 20 bp, Artificial sequence
  Primer
gagactcgcgcgagtctcgg

SEQ ID NO: 12296 - DNA, 20 bp, Artificial sequence
  Primer
gggactcgcgcgagtcccga

SEQ ID NO: 12297 - DNA, 20 bp, Artificial sequence
  Primer
gggactcgcgcgagtcccag

SEQ ID NO: 12298 - DNA, 20 bp, Artificial sequence
  Primer
tggactcgcgcgagtccagg

SEQ ID NO: 12299 - DNA, 20 bp, Artificial sequence
  Primer
gtgactcgcgcgagtcacgg

SEQ ID NO: 12300 - DNA, 20 bp, Artificial sequence
  Primer
gcgactcgcgcgagtcgccg

SEQ ID NO: 12301 - DNA, 20 bp, Artificial sequence
  Primer
gcgactcgcgcgagtcgctg

SEQ ID NO: 12302 - DNA, 20 bp, Artificial sequence
  Primer
acgactcgcgcgagtcgtcg

SEQ ID NO: 12303 - DNA, 20 bp, Artificial sequence
  Primer
gagactcgcgcgagtctccg

SEQ ID NO: 12304 - DNA, 20 bp, Artificial sequence
  Primer
gcgactcgcgcgagtcgcag

SEQ ID NO: 12305 - DNA, 20 bp, Artificial sequence
  Primer
gtgactcgcgcgagtcaccg

SEQ ID NO: 12306 - DNA, 20 bp, Artificial sequence
  Primer
cggactcgcgcgagtccgtg

SEQ ID NO: 12307 - DNA, 20 bp, Artificial sequence
  Primer
cagactcgcgcgagtctggg

SEQ ID NO: 12308 - DNA, 20 bp, Artificial sequence
  Primer
cggactcgcgcgagtccgag

SEQ ID NO: 12309 - DNA, 20 bp, Artificial sequence
  Primer
ctgactcgcgcgagtcaggg

SEQ ID NO: 12310 - DNA, 20 bp, Artificial sequence
  Primer
acgactcgcgcgagtcgtgg

SEQ ID NO: 12311 - DNA, 20 bp, Artificial sequence
  Primer
ccgactcgcgcgagtcggct

SEQ ID NO: 12312 - DNA, 20 bp, Artificial sequence
  Primer
ccgactcgcgcgagtcggca

SEQ ID NO: 12313 - DNA, 20 bp, Artificial sequence
  Primer
gagactcgcgcgagtctcgc

SEQ ID NO: 12314 - DNA, 20 bp, Artificial sequence
  Primer
gtgactcgcgcgagtcacgc

SEQ ID NO: 12315 - DNA, 20 bp, Artificial sequence
  Primer
aggactcgcgcgagtcctgc

SEQ ID NO: 12316 - DNA, 20 bp, Artificial sequence
  Primer
tggactcgcgcgagtccagc

SEQ ID NO: 12317 - DNA, 20 bp, Artificial sequence
  Primer
aggactcgcgcgagtcctcg

SEQ ID NO: 12318 - DNA, 20 bp, Artificial sequence
  Primer
tggactcgcgcgagtccacg

SEQ ID NO: 12319 - DNA, 20 bp, Artificial sequence
  Primer
ccgactcgcgcgagtcggtg

SEQ ID NO: 12320 - DNA, 20 bp, Artificial sequence
  Primer
ccgactcgcgcgagtcggag

SEQ ID NO: 12321 - DNA, 20 bp, Artificial sequence
  Primer
gggactcgcgcgagtcccgc

SEQ ID NO: 12322 - DNA, 20 bp, Artificial sequence
  Primer
gggactcgcgcgagtccctc

SEQ ID NO: 12323 - DNA, 20 bp, Artificial sequence
  Primer
gggactcgcgcgagtcccac

SEQ ID NO: 12324 - DNA, 20 bp, Artificial sequence
  Primer
  misc_feature (1)..(2): n is a, c, g, or t
  misc_feature (17)..(20): n is a, c, g, or t
nngactcacgtgagtcnnnn

SEQ ID NO: 12325 - DNA, 20 bp, Artificial sequence
  Primer
cggactcacgtgagtccgcc

SEQ ID NO: 12326 - DNA, 20 bp, Artificial sequence
  Primer
cggactcacgtgagtccgct

SEQ ID NO: 12327 - DNA, 20 bp, Artificial sequence
  Primer
cggactcacgtgagtccgtc

SEQ ID NO: 12328 - DNA, 20 bp, Artificial sequence
  Primer
aggactcacgtgagtcctcc

SEQ ID NO: 12329 - DNA, 20 bp, Artificial sequence
  Primer
cagactcacgtgagtctgcc

SEQ ID NO: 12330 - DNA, 20 bp, Artificial sequence
  Primer
cggactcacgtgagtccgca

SEQ ID NO: 12331 - DNA, 20 bp, Artificial sequence
  Primer
cggactcacgtgagtccgac

SEQ ID NO: 12332 - DNA, 20 bp, Artificial sequence
  Primer
tggactcacgtgagtccacc

SEQ ID NO: 12333 - DNA, 20 bp, Artificial sequence
  Primer
ctgactcacgtgagtcagcc

SEQ ID NO: 12334 - DNA, 20 bp, Artificial sequence
  Primer
ccgactcacgtgagtcgggc

SEQ ID NO: 12335 - DNA, 20 bp, Artificial sequence
  Primer
ccgactcacgtgagtcgggt

SEQ ID NO: 12336 - DNA, 20 bp, Artificial sequence
  Primer
ccgactcacgtgagtcggtc

SEQ ID NO: 12337 - DNA, 20 bp, Artificial sequence
  Primer
acgactcacgtgagtcgtgc

SEQ ID NO: 12338 - DNA, 20 bp, Artificial sequence
  Primer
cagactcacgtgagtctggc

SEQ ID NO: 12339 - DNA, 20 bp, Artificial sequence
  Primer
ccgactcacgtgagtcggga

SEQ ID NO: 12340 - DNA, 20 bp, Artificial sequence
  Primer
ccgactcacgtgagtcggac

SEQ ID NO: 12341 - DNA, 20 bp, Artificial sequence
  Primer
ctgactcacgtgagtcaggc

SEQ ID NO: 12342 - DNA, 20 bp, Artificial sequence
  Primer
gcgactcacgtgagtcgccc

SEQ ID NO: 12343 - DNA, 20 bp, Artificial sequence
  Primer
gcgactcacgtgagtcgcct

SEQ ID NO: 12344 - DNA, 20 bp, Artificial sequence
  Primer
gcgactcacgtgagtcgctc

SEQ ID NO: 12345 - DNA, 20 bp, Artificial sequence
  Primer
acgactcacgtgagtcgtcc

SEQ ID NO: 12346 - DNA, 20 bp, Artificial sequence
  Primer
gagactcacgtgagtctccc

SEQ ID NO: 12347 - DNA, 20 bp, Artificial sequence
  Primer
gcgactcacgtgagtcgcca

SEQ ID NO: 12348 - DNA, 20 bp, Artificial sequence
  Primer
gcgactcacgtgagtcgcac

SEQ ID NO: 12349 - DNA, 20 bp, Artificial sequence
  Primer
gtgactcacgtgagtcaccc

SEQ ID NO: 12350 - DNA, 20 bp, Artificial sequence
  Primer
gggactcacgtgagtcccgt

SEQ ID NO: 12351 - DNA, 20 bp, Artificial sequence
  Primer
gggactcacgtgagtccctg

SEQ ID NO: 12352 - DNA, 20 bp, Artificial sequence
  Primer
aggactcacgtgagtcctgg

SEQ ID NO: 12353 - DNA, 20 bp, Artificial sequence
  Primer
gagactcacgtgagtctcgg

SEQ ID NO: 12354 - DNA, 20 bp, Artificial sequence
  Primer
gggactcacgtgagtcccga

SEQ ID NO: 12355 - DNA, 20 bp, Artificial sequence
  Primer
gggactcacgtgagtcccag

SEQ ID NO: 12356 - DNA, 20 bp, Artificial sequence
  Primer
tggactcacgtgagtccagg

SEQ ID NO: 12357 - DNA, 20 bp, Artificial sequence
  Primer
gtgactcacgtgagtcacgg

SEQ ID NO: 12358 - DNA, 20 bp, Artificial sequence
  Primer
gcgactcacgtgagtcgccg

SEQ ID NO: 12359 - DNA, 20 bp, Artificial sequence
  Primer
gcgactcacgtgagtcgctg

SEQ ID NO: 12360 - DNA, 20 bp, Artificial sequence
  Primer
acgactcacgtgagtcgtcg

SEQ ID NO: 12361 - DNA, 20 bp, Artificial sequence
  Primer
gagactcacgtgagtctccg

SEQ ID NO: 12362 - DNA, 20 bp, Artificial sequence
  Primer
gcgactcacgtgagtcgcag

SEQ ID NO: 12363 - DNA, 20 bp, Artificial sequence
  Primer
gtgactcacgtgagtcaccg

SEQ ID NO: 12364 - DNA, 20 bp, Artificial sequence
  Primer
cggactcacgtgagtccgtg

SEQ ID NO: 12365 - DNA, 20 bp, Artificial sequence
  Primer
cagactcacgtgagtctggg

SEQ ID NO: 12366 - DNA, 20 bp, Artificial sequence
  Primer
cggactcacgtgagtccgag

SEQ ID NO: 12367 - DNA, 20 bp, Artificial sequence
  Primer
ctgactcacgtgagtcaggg

SEQ ID NO: 12368 - DNA, 20 bp, Artificial sequence
  Primer
acgactcacgtgagtcgtgg

SEQ ID NO: 12369 - DNA, 20 bp, Artificial sequence
  Primer
ccgactcacgtgagtcggct

SEQ ID NO: 12370 - DNA, 20 bp, Artificial sequence
  Primer
ccgactcacgtgagtcggca

SEQ ID NO: 12371 - DNA, 20 bp, Artificial sequence
  Primer
gagactcacgtgagtctcgc

SEQ ID NO: 12372 - DNA, 20 bp, Artificial sequence
  Primer
gtgactcacgtgagtcacgc

SEQ ID NO: 12373 - DNA, 20 bp, Artificial sequence
  Primer
aggactcacgtgagtcctgc

SEQ ID NO: 12374 - DNA, 20 bp, Artificial sequence
  Primer
tggactcacgtgagtccagc

SEQ ID NO: 12375 - DNA, 20 bp, Artificial sequence
  Primer
aggactcacgtgagtcctcg

SEQ ID NO: 12376 - DNA, 20 bp, Artificial sequence
  Primer
tggactcacgtgagtccacg

SEQ ID NO: 12377 - DNA, 20 bp, Artificial sequence
  Primer
ccgactcacgtgagtcggtg

SEQ ID NO: 12378 - DNA, 20 bp, Artificial sequence
  Primer
ccgactcacgtgagtcggag

SEQ ID NO: 12379 - DNA, 20 bp, Artificial sequence
  Primer
gggactcacgtgagtcccgc

SEQ ID NO: 12380 - DNA, 20 bp, Artificial sequence
  Primer
gggactcacgtgagtccctc

SEQ ID NO: 12381 - DNA, 20 bp, Artificial sequence
  Primer
gggactcacgtgagtcccac

SEQ ID NO: 12382 - DNA, 20 bp, Artificial sequence
  Primer
  misc_feature (1)..(2): n is a, c, g, or t
  misc_feature (17)..(20): n is a, c, g, or t
nngactcggccgagtcnnnn

SEQ ID NO: 12383 - DNA, 20 bp, Artificial sequence
  Primer
cggactcggccgagtccgcc

SEQ ID NO: 12384 - DNA, 20 bp, Artificial sequence
  Primer
cggactcggccgagtccgct

SEQ ID NO: 12385 - DNA, 20 bp, Artificial sequence
  Primer
cggactcggccgagtccgtc

SEQ ID NO: 12386 - DNA, 20 bp, Artificial sequence
  Primer
aggactcggccgagtcctcc

SEQ ID NO: 12387 - DNA, 20 bp, Artificial sequence
  Primer
cagactcggccgagtctgcc

SEQ ID NO: 12388 - DNA, 20 bp, Artificial sequence
  Primer
cggactcggccgagtccgca

SEQ ID NO: 12389 - DNA, 20 bp, Artificial sequence
  Primer
cggactcggccgagtccgac

SEQ ID NO: 12390 - DNA, 20 bp, Artificial sequence
  Primer
tggactcggccgagtccacc

SEQ ID NO: 12391 - DNA, 20 bp, Artificial sequence
  Primer
ctgactcggccgagtcagcc

SEQ ID NO: 12392 - DNA, 20 bp, Artificial sequence
  Primer
ccgactcggccgagtcgggc

SEQ ID NO: 12393 - DNA, 20 bp, Artificial sequence
  Primer
ccgactcggccgagtcgggt

SEQ ID NO: 12394 - DNA, 20 bp, Artificial sequence
  Primer
ccgactcggccgagtcggtc

SEQ ID NO: 12395 - DNA, 20 bp, Artificial sequence
  Primer
acgactcggccgagtcgtgc

SEQ ID NO: 12396 - DNA, 20 bp, Artificial sequence
  Primer
cagactcggccgagtctggc

SEQ ID NO: 12397 - DNA, 20 bp, Artificial sequence
  Primer
ccgactcggccgagtcggga

SEQ ID NO: 12398 - DNA, 20 bp, Artificial sequence
  Primer
ccgactcggccgagtcggac

SEQ ID NO: 12399 - DNA, 20 bp, Artificial sequence
  Primer
ctgactcggccgagtcaggc

SEQ ID NO: 12400 - DNA, 20 bp, Artificial sequence
  Primer
gcgactcggccgagtcgccc

SEQ ID NO: 12401 - DNA, 20 bp, Artificial sequence
  Primer
gcgactcggccgagtcgcct

SEQ ID NO: 12402 - DNA, 20 bp, Artificial sequence
  Primer
gcgactcggccgagtcgctc

SEQ ID NO: 12403 - DNA, 20 bp, Artificial sequence
  Primer
acgactcggccgagtcgtcc

SEQ ID NO: 12404 - DNA, 20 bp, Artificial sequence
  Primer
gagactcggccgagtctccc

SEQ ID NO: 12405 - DNA, 20 bp, Artificial sequence
  Primer
gcgactcggccgagtcgcca

SEQ ID NO: 12406 - DNA, 20 bp, Artificial sequence
  Primer
gcgactcggccgagtcgcac

SEQ ID NO: 12407 - DNA, 20 bp, Artificial sequence
  Primer
gtgactcggccgagtcaccc

SEQ ID NO: 12408 - DNA, 20 bp, Artificial sequence
  Primer
gggactcggccgagtcccgt

SEQ ID NO: 12409 - DNA, 20 bp, Artificial sequence
  Primer
gggactcggccgagtccctg

SEQ ID NO: 12410 - DNA, 20 bp, Artificial sequence
  Primer
aggactcggccgagtcctgg

SEQ ID NO: 12411 - DNA, 20 bp, Artificial sequence
  Primer
gagactcggccgagtctcgg

SEQ ID NO: 12412 - DNA, 20 bp, Artificial sequence
  Primer
gggactcggccgagtcccga

SEQ ID NO: 12413 - DNA, 20 bp, Artificial sequence
  Primer
gggactcggccgagtcccag

SEQ ID NO: 12414 - DNA, 20 bp, Artificial sequence
  Primer
tggactcggccgagtccagg

SEQ ID NO: 12415 - DNA, 20 bp, Artificial sequence
  Primer
gtgactcggccgagtcacgg

SEQ ID NO: 12416 - DNA, 20 bp, Artificial sequence
  Primer
gcgactcggccgagtcgccg

SEQ ID NO: 12417 - DNA, 20 bp, Artificial sequence
  Primer
gcgactcggccgagtcgctg

SEQ ID NO: 12418 - DNA, 20 bp, Artificial sequence
  Primer
acgactcggccgagtcgtcg

SEQ ID NO: 12419 - DNA, 20 bp, Artificial sequence
  Primer
gagactcggccgagtctccg

SEQ ID NO: 12420 - DNA, 20 bp, Artificial sequence
  Primer
gcgactcggccgagtcgcag

SEQ ID NO: 12421 - DNA, 20 bp, Artificial sequence
  Primer
gtgactcggccgagtcaccg

SEQ ID NO: 12422 - DNA, 20 bp, Artificial sequence
  Primer
cggactcggccgagtccgtg

SEQ ID NO: 12423 - DNA, 20 bp, Artificial sequence
  Primer
cagactcggccgagtctggg

SEQ ID NO: 12424 - DNA, 20 bp, Artificial sequence
  Primer
cggactcggccgagtccgag

SEQ ID NO: 12425 - DNA, 20 bp, Artificial sequence
  Primer
ctgactcggccgagtcaggg

SEQ ID NO: 12426 - DNA, 20 bp, Artificial sequence
  Primer
acgactcggccgagtcgtgg

SEQ ID NO: 12427 - DNA, 20 bp, Artificial sequence
  Primer
ccgactcggccgagtcggct

SEQ ID NO: 12428 - DNA, 20 bp, Artificial sequence
  Primer
ccgactcggccgagtcggca

SEQ ID NO: 12429 - DNA, 20 bp, Artificial sequence
  Primer
gagactcggccgagtctcgc

SEQ ID NO: 12430 - DNA, 20 bp, Artificial sequence
  Primer
gtgactcggccgagtcacgc

SEQ ID NO: 12431 - DNA, 20 bp, Artificial sequence
  Primer
aggactcggccgagtcctgc

SEQ ID NO: 12432 - DNA, 20 bp, Artificial sequence
  Primer
tggactcggccgagtccagc

SEQ ID NO: 12433 - DNA, 20 bp, Artificial sequence
  Primer
aggactcggccgagtcctcg

SEQ ID NO: 12434 - DNA, 20 bp, Artificial sequence
  Primer
tggactcggccgagtccacg

SEQ ID NO: 12435 - DNA, 20 bp, Artificial sequence
  Primer
ccgactcggccgagtcggtg

SEQ ID NO: 12436 - DNA, 20 bp, Artificial sequence
  Primer
ccgactcggccgagtcggag

SEQ ID NO: 12437 - DNA, 20 bp, Artificial sequence
  Primer
gggactcggccgagtcccgc

SEQ ID NO: 12438 - DNA, 20 bp, Artificial sequence
  Primer
gggactcggccgagtccctc

SEQ ID NO: 12439 - DNA, 20 bp, Artificial sequence
  Primer
gggactcggccgagtcccac

SEQ ID NO: 12440 - DNA, 20 bp, Artificial sequence
  Primer
  misc_feature (1)..(2): n is a, c, g, or t
  misc_feature (17)..(20): n is a, c, g, or t
nngactcccgggagtcnnnn

SEQ ID NO: 12441 - DNA, 20 bp, Artificial sequence
  Primer
cggactcccgggagtccgcc

SEQ ID NO: 12442 - DNA, 20 bp, Artificial sequence
  Primer
cggactcccgggagtccgct

SEQ ID NO: 12443 - DNA, 20 bp, Artificial sequence
  Primer
cggactcccgggagtccgtc

SEQ ID NO: 12444 - DNA, 20 bp, Artificial sequence
  Primer
aggactcccgggagtcctcc

SEQ ID NO: 12445 - DNA, 20 bp, Artificial sequence
  Primer
cagactcccgggagtctgcc

SEQ ID NO: 12446 - DNA, 20 bp, Artificial sequence
  Primer
cggactcccgggagtccgca

SEQ ID NO: 12447 - DNA, 20 bp, Artificial sequence
  Primer
cggactcccgggagtccgac

SEQ ID NO: 12448 - DNA, 20 bp, Artificial sequence
  Primer
tggactcccgggagtccacc

SEQ ID NO: 12449 - DNA, 20 bp, Artificial sequence
  Primer
ctgactcccgggagtcagcc

SEQ ID NO: 12450 - DNA, 20 bp, Artificial sequence
  Primer
ccgactcccgggagtcgggc

SEQ ID NO: 12451 - DNA, 20 bp, Artificial sequence
  Primer
ccgactcccgggagtcgggt

SEQ ID NO: 12452 - DNA, 20 bp, Artificial sequence
  Primer
ccgactcccgggagtcggtc

SEQ ID NO: 12453 - DNA, 20 bp, Artificial sequence
  Primer
acgactcccgggagtcgtgc

SEQ ID NO: 12454 - DNA, 20 bp, Artificial sequence
  Primer
cagactcccgggagtctggc

SEQ ID NO: 12455 - DNA, 20 bp, Artificial sequence
  Primer
ccgactcccgggagtcggga

SEQ ID NO: 12456 - DNA, 20 bp, Artificial sequence
  Primer
ccgactcccgggagtcggac

SEQ ID NO: 12457 - DNA, 20 bp, Artificial sequence
  Primer
ctgactcccgggagtcaggc

SEQ ID NO: 12458 - DNA, 20 bp, Artificial sequence
  Primer
gcgactcccgggagtcgccc

SEQ ID NO: 12459 - DNA, 20 bp, Artificial sequence
  Primer
gcgactcccgggagtcgcct

SEQ ID NO: 12460 - DNA, 20 bp, Artificial sequence
  Primer
gcgactcccgggagtcgctc

SEQ ID NO: 12461 - DNA, 20 bp, Artificial sequence
  Primer
acgactcccgggagtcgtcc

SEQ ID NO: 12462 - DNA, 20 bp, Artificial sequence
  Primer
gagactcccgggagtctccc

SEQ ID NO: 12463 - DNA, 20 bp, Artificial sequence
  Primer
gcgactcccgggagtcgcca

SEQ ID NO: 12464 - DNA, 20 bp, Artificial sequence
  Primer
gcgactcccgggagtcgcac

SEQ ID NO: 12465 - DNA, 20 bp, Artificial sequence
  Primer
gtgactcccgggagtcaccc

SEQ ID NO: 12466 - DNA, 20 bp, Artificial sequence
  Primer
gggactcccgggagtcccgt

SEQ ID NO: 12467 - DNA, 20 bp, Artificial sequence
  Primer
gggactcccgggagtccctg

SEQ ID NO: 12468 - DNA, 20 bp, Artificial sequence
  Primer
aggactcccgggagtcctgg

SEQ ID NO: 12469 - DNA, 20 bp, Artificial sequence
  Primer
gagactcccgggagtctcgg

SEQ ID NO: 12470 - DNA, 20 bp, Artificial sequence
  Primer
gggactcccgggagtcccga

SEQ ID NO: 12471 - DNA, 20 bp, Artificial sequence
  Primer
gggactcccgggagtcccag

SEQ ID NO: 12472 - DNA, 20 bp, Artificial sequence
  Primer
tggactcccgggagtccagg

SEQ ID NO: 12473 - DNA, 20 bp, Artificial sequence
  Primer
gtgactcccgggagtcacgg

SEQ ID NO: 12474 - DNA, 20 bp, Artificial sequence
  Primer
gcgactcccgggagtcgccg

SEQ ID NO: 12475 - DNA, 20 bp, Artificial sequence
  Primer
gcgactcccgggagtcgctg

SEQ ID NO: 12476 - DNA, 20 bp, Artificial sequence
  Primer
acgactcccgggagtcgtcg

SEQ ID NO: 12477 - DNA, 20 bp, Artificial sequence
  Primer
gagactcccgggagtctccg

SEQ ID NO: 12478 - DNA, 20 bp, Artificial sequence
  Primer
gcgactcccgggagtcgcag

SEQ ID NO: 12479 - DNA, 20 bp, Artificial sequence
  Primer
gtgactcccgggagtcaccg

SEQ ID NO: 12480 - DNA, 20 bp, Artificial sequence
  Primer
cggactcccgggagtccgtg

SEQ ID NO: 12481 - DNA, 20 bp, Artificial sequence
  Primer
cagactcccgggagtctggg

SEQ ID NO: 12482 - DNA, 20 bp, Artificial sequence
  Primer
cggactcccgggagtccgag

SEQ ID NO: 12483 - DNA, 20 bp, Artificial sequence
  Primer
ctgactcccgggagtcaggg

SEQ ID NO: 12484 - DNA, 20 bp, Artificial sequence
  Primer
acgactcccgggagtcgtgg

SEQ ID NO: 12485 - DNA, 20 bp, Artificial sequence
  Primer
ccgactcccgggagtcggct

SEQ ID NO: 12486 - DNA, 20 bp, Artificial sequence
  Primer
ccgactcccgggagtcggca

SEQ ID NO: 12487 - DNA, 20 bp, Artificial sequence
  Primer
gagactcccgggagtctcgc

SEQ ID NO: 12488 - DNA, 20 bp, Artificial sequence
  Primer
gtgactcccgggagtcacgc

SEQ ID NO: 12489 - DNA, 20 bp, Artificial sequence
  Primer
aggactcccgggagtcctgc

SEQ ID NO: 12490 - DNA, 20 bp, Artificial sequence
  Primer
tggactcccgggagtccagc

SEQ ID NO: 12491 - DNA, 20 bp, Artificial sequence
  Primer
aggactcccgggagtcctcg

SEQ ID NO: 12492 - DNA, 20 bp, Artificial sequence
  Primer
tggactcccgggagtccacg

SEQ ID NO: 12493 - DNA, 20 bp, Artificial sequence
  Primer
ccgactcccgggagtcggtg

SEQ ID NO: 12494 - DNA, 20 bp, Artificial sequence
  Primer
ccgactcccgggagtcggag

SEQ ID NO: 12495 - DNA, 20 bp, Artificial sequence
  Primer
gggactcccgggagtcccgc

SEQ ID NO: 12496 - DNA, 20 bp, Artificial sequence
  Primer
gggactcccgggagtccctc

SEQ ID NO: 12497 - DNA, 20 bp, Artificial sequence
  Primer
gggactcccgggagtcccac

SEQ ID NO: 12498 - DNA, 20 bp, Artificial sequence
  Primer
  misc_feature (1)..(2): n is a, c, g, or t
  misc_feature (17)..(20): n is a, c, g, or t
nngactcgtacgagtcnnnn

SEQ ID NO: 12499 - DNA, 20 bp, Artificial sequence
  Primer
cggactcgtacgagtccgcc

SEQ ID NO: 12500 - DNA, 20 bp, Artificial sequence
  Primer
cggactcgtacgagtccgct

SEQ ID NO: 12501 - DNA, 20 bp, Artificial sequence
  Primer
cggactcgtacgagtccgtc

SEQ ID NO: 12502 - DNA, 20 bp, Artificial sequence
  Primer
aggactcgtacgagtcctcc

SEQ ID NO: 12503 - DNA, 20 bp, Artificial sequence
  Primer
cagactcgtacgagtctgcc

SEQ ID NO: 12504 - DNA, 20 bp, Artificial sequence
  Primer
cggactcgtacgagtccgca

SEQ ID NO: 12505 - DNA, 20 bp, Artificial sequence
  Primer
cggactcgtacgagtccgac

SEQ ID NO: 12506 - DNA, 20 bp, Artificial sequence
  Primer
tggactcgtacgagtccacc

SEQ ID NO: 12507 - DNA, 20 bp, Artificial sequence
  Primer
ctgactcgtacgagtcagcc

SEQ ID NO: 12508 - DNA, 20 bp, Artificial sequence
  Primer
ccgactcgtacgagtcgggc

SEQ ID NO: 12509 - DNA, 20 bp, Artificial sequence
  Primer
ccgactcgtacgagtcgggt

SEQ ID NO: 12510 - DNA, 20 bp, Artificial sequence
  Primer
ccgactcgtacgagtcggtc

SEQ ID NO: 12511 - DNA, 20 bp, Artificial sequence
  Primer
acgactcgtacgagtcgtgc

SEQ ID NO: 12512 - DNA, 20 bp, Artificial sequence
  Primer
cagactcgtacgagtctggc

SEQ ID NO: 12513 - DNA, 20 bp, Artificial sequence
  Primer
ccgactcgtacgagtcggga

SEQ ID NO: 12514 - DNA, 20 bp, Artificial sequence
  Primer
ccgactcgtacgagtcggac

SEQ ID NO: 12515 - DNA, 20 bp, Artificial sequence
  Primer
ctgactcgtacgagtcaggc

SEQ ID NO: 12516 - DNA, 20 bp, Artificial sequence
  Primer
gcgactcgtacgagtcgccc

SEQ ID NO: 12517 - DNA, 20 bp, Artificial sequence
  Primer
gcgactcgtacgagtcgcct

SEQ ID NO: 12518 - DNA, 20 bp, Artificial sequence
  Primer
gcgactcgtacgagtcgctc

SEQ ID NO: 12519 - DNA, 20 bp, Artificial sequence
  Primer
acgactcgtacgagtcgtcc

SEQ ID NO: 12520 - DNA, 20 bp, Artificial sequence
  Primer
gagactcgtacgagtctccc

SEQ ID NO: 12521 - DNA, 20 bp, Artificial sequence
  Primer
gcgactcgtacgagtcgcca

SEQ ID NO: 12522 - DNA, 20 bp, Artificial sequence
  Primer
gcgactcgtacgagtcgcac

SEQ ID NO: 12523 - DNA, 20 bp, Artificial sequence
  Primer
gtgactcgtacgagtcaccc

SEQ ID NO: 12524 - DNA, 20 bp, Artificial sequence
  Primer
gggactcgtacgagtcccgt

SEQ ID NO: 12525 - DNA, 20 bp, Artificial sequence
  Primer
gggactcgtacgagtccctg

SEQ ID NO: 12526 - DNA, 20 bp, Artificial sequence
  Primer
aggactcgtacgagtcctgg

SEQ ID NO: 12527 - DNA, 20 bp, Artificial sequence
  Primer
gagactcgtacgagtctcgg

SEQ ID NO: 12528 - DNA, 20 bp, Artificial sequence
  Primer
gggactcgtacgagtcccga

SEQ ID NO: 12529 - DNA, 20 bp, Artificial sequence
  Primer
gggactcgtacgagtcccag

SEQ ID NO: 12530 - DNA, 20 bp, Artificial sequence
  Primer
tggactcgtacgagtccagg

SEQ ID NO: 12531 - DNA, 20 bp, Artificial sequence
  Primer
gtgactcgtacgagtcacgg

SEQ ID NO: 12532 - DNA, 20 bp, Artificial sequence
  Primer
gcgactcgtacgagtcgccg

SEQ ID NO: 12533 - DNA, 20 bp, Artificial sequence
  Primer
gcgactcgtacgagtcgctg

SEQ ID NO: 12534 - DNA, 20 bp, Artificial sequence
  Primer
acgactcgtacgagtcgtcg

SEQ ID NO: 12535 - DNA, 20 bp, Artificial sequence
  Primer
gagactcgtacgagtctccg

SEQ ID NO: 12536 - DNA, 20 bp, Artificial sequence
  Primer
gcgactcgtacgagtcgcag

SEQ ID NO: 12537 - DNA, 20 bp, Artificial sequence
  Primer
gtgactcgtacgagtcaccg

SEQ ID NO: 12538 - DNA, 20 bp, Artificial sequence
  Primer
cggactcgtacgagtccgtg

SEQ ID NO: 12539 - DNA, 20 bp, Artificial sequence
  Primer
cagactcgtacgagtctggg

SEQ ID NO: 12540 - DNA, 20 bp, Artificial sequence
  Primer
cggactcgtacgagtccgag

SEQ ID NO: 12541 - DNA, 20 bp, Artificial sequence
  Primer
ctgactcgtacgagtcaggg

SEQ ID NO: 12542 - DNA, 20 bp, Artificial sequence
  Primer
acgactcgtacgagtcgtgg

SEQ ID NO: 12543 - DNA, 20 bp, Artificial sequence
  Primer
ccgactcgtacgagtcggct

SEQ ID NO: 12544 - DNA, 20 bp, Artificial sequence
  Primer
ccgactcgtacgagtcggca

SEQ ID NO: 12545 - DNA, 20 bp, Artificial sequence
  Primer
gagactcgtacgagtctcgc

SEQ ID NO: 12546 - DNA, 20 bp, Artificial sequence
  Primer
gtgactcgtacgagtcacgc

SEQ ID NO: 12547 - DNA, 20 bp, Artificial sequence
  Primer
aggactcgtacgagtcctgc

SEQ ID NO: 12548 - DNA, 20 bp, Artificial sequence
  Primer
tggactcgtacgagtccagc

SEQ ID NO: 12549 - DNA, 20 bp, Artificial sequence
  Primer
aggactcgtacgagtcctcg

SEQ ID NO: 12550 - DNA, 20 bp, Artificial sequence
  Primer
tggactcgtacgagtccacg

SEQ ID NO: 12551 - DNA, 20 bp, Artificial sequence
  Primer
ccgactcgtacgagtcggtg

SEQ ID NO: 12552 - DNA, 20 bp, Artificial sequence
  Primer
ccgactcgtacgagtcggag

SEQ ID NO: 12553 - DNA, 20 bp, Artificial sequence
  Primer
gggactcgtacgagtcccgc

SEQ ID NO: 12554 - DNA, 20 bp, Artificial sequence
  Primer
gggactcgtacgagtccctc

SEQ ID NO: 12555 - DNA, 20 bp, Artificial sequence
  Primer
gggactcgtacgagtcccac

SEQ ID NO: 12556 - DNA, 20 bp, Artificial sequence
  Primer
  misc_feature (1)..(2): n is a, c, g, or t
  misc_feature (17)..(20): n is a, c, g, or t
nngactcctaggagtcnnnn

SEQ ID NO: 12557 - DNA, 20 bp, Artificial sequence
  Primer
cggactcctaggagtccgcc

SEQ ID NO: 12558 - DNA, 20 bp, Artificial sequence
  Primer
cggactcctaggagtccgct

SEQ ID NO: 12559 - DNA, 20 bp, Artificial sequence
  Primer
cggactcctaggagtccgtc

SEQ ID NO: 12560 - DNA, 20 bp, Artificial sequence
  Primer
aggactcctaggagtcctcc

SEQ ID NO: 12561 - DNA, 20 bp, Artificial sequence
  Primer
cagactcctaggagtctgcc

SEQ ID NO: 12562 - DNA, 20 bp, Artificial sequence
  Primer
cggactcctaggagtccgca

SEQ ID NO: 12563 - DNA, 20 bp, Artificial sequence
  Primer
cggactcctaggagtccgac

SEQ ID NO: 12564 - DNA, 20 bp, Artificial sequence
  Primer
tggactcctaggagtccacc

SEQ ID NO: 12565 - DNA, 20 bp, Artificial sequence
  Primer
ctgactcctaggagtcagcc

SEQ ID NO: 12566 - DNA, 20 bp, Artificial sequence
  Primer
ccgactcctaggagtcgggc

SEQ ID NO: 12567 - DNA, 20 bp, Artificial sequence
  Primer
ccgactcctaggagtcgggt

SEQ ID NO: 12568 - DNA, 20 bp, Artificial sequence
  Primer
ccgactcctaggagtcggtc

SEQ ID NO: 12569 - DNA, 20 bp, Artificial sequence
  Primer
acgactcctaggagtcgtgc

SEQ ID NO: 12570 - DNA, 20 bp, Artificial sequence
  Primer
cagactcctaggagtctggc

SEQ ID NO: 12571 - DNA, 20 bp, Artificial sequence
  Primer
ccgactcctaggagtcggga

SEQ ID NO: 12572 - DNA, 20 bp, Artificial sequence
  Primer
ccgactcctaggagtcggac

SEQ ID NO: 12573 - DNA, 20 bp, Artificial sequence
  Primer
ctgactcctaggagtcaggc

SEQ ID NO: 12574 - DNA, 20 bp, Artificial sequence
  Primer
gcgactcctaggagtcgccc

SEQ ID NO: 12575 - DNA, 20 bp, Artificial sequence
  Primer
gcgactcctaggagtcgcct

SEQ ID NO: 12576 - DNA, 20 bp, Artificial sequence
  Primer
gcgactcctaggagtcgctc

SEQ ID NO: 12577 - DNA, 20 bp, Artificial sequence
  Primer
acgactcctaggagtcgtcc

SEQ ID NO: 12578 - DNA, 20 bp, Artificial sequence
  Primer
gagactcctaggagtctccc

SEQ ID NO: 12579 - DNA, 20 bp, Artificial sequence
  Primer
gcgactcctaggagtcgcca

SEQ ID NO: 12580 - DNA, 20 bp, Artificial sequence
  Primer
gcgactcctaggagtcgcac

SEQ ID NO: 12581 - DNA, 20 bp, Artificial sequence
  Primer
gtgactcctaggagtcaccc

SEQ ID NO: 12582 - DNA, 20 bp, Artificial sequence
  Primer
gggactcctaggagtcccgt

SEQ ID NO: 12583 - DNA, 20 bp, Artificial sequence
  Primer
gggactcctaggagtccctg

SEQ ID NO: 12584 - DNA, 20 bp, Artificial sequence
  Primer
aggactcctaggagtcctgg

SEQ ID NO: 12585 - DNA, 20 bp, Artificial sequence
  Primer
gagactcctaggagtctcgg

SEQ ID NO: 12586 - DNA, 20 bp, Artificial sequence
  Primer
gggactcctaggagtcccga

SEQ ID NO: 12587 - DNA, 20 bp, Artificial sequence
  Primer
gggactcctaggagtcccag

SEQ ID NO: 12588 - DNA, 20 bp, Artificial sequence
  Primer
tggactcctaggagtccagg

SEQ ID NO: 12589 - DNA, 20 bp, Artificial sequence
  Primer
gtgactcctaggagtcacgg

SEQ ID NO: 12590 - DNA, 20 bp, Artificial sequence
  Primer
gcgactcctaggagtcgccg

SEQ ID NO: 12591 - DNA, 20 bp, Artificial sequence
  Primer
gcgactcctaggagtcgctg

SEQ ID NO: 12592 - DNA, 20 bp, Artificial sequence
  Primer
acgactcctaggagtcgtcg

SEQ ID NO: 12593 - DNA, 20 bp, Artificial sequence
  Primer
gagactcctaggagtctccg

SEQ ID NO: 12594 - DNA, 20 bp, Artificial sequence
  Primer
gcgactcctaggagtcgcag

SEQ ID NO: 12595 - DNA, 20 bp, Artificial sequence
  Primer
gtgactcctaggagtcaccg

SEQ ID NO: 12596 - DNA, 20 bp, Artificial sequence
  Primer
cggactcctaggagtccgtg

SEQ ID NO: 12597 - DNA, 20 bp, Artificial sequence
  Primer
cagactcctaggagtctggg

SEQ ID NO: 12598 - DNA, 20 bp, Artificial sequence
  Primer
cggactcctaggagtccgag

SEQ ID NO: 12599 - DNA, 20 bp, Artificial sequence
  Primer
ctgactcctaggagtcaggg

SEQ ID NO: 12600 - DNA, 20 bp, Artificial sequence
  Primer
acgactcctaggagtcgtgg

SEQ ID NO: 12601 - DNA, 20 bp, Artificial sequence
  Primer
ccgactcctaggagtcggct

SEQ ID NO: 12602 - DNA, 20 bp, Artificial sequence
  Primer
ccgactcctaggagtcggca

SEQ ID NO: 12603 - DNA, 20 bp, Artificial sequence
  Primer
gagactcctaggagtctcgc

SEQ ID NO: 12604 - DNA, 20 bp, Artificial sequence
  Primer
gtgactcctaggagtcacgc

SEQ ID NO: 12605 - DNA, 20 bp, Artificial sequence
  Primer
aggactcctaggagtcctgc

SEQ ID NO: 12606 - DNA, 20 bp, Artificial sequence
  Primer
tggactcctaggagtccagc

SEQ ID NO: 12607 - DNA, 20 bp, Artificial sequence
  Primer
aggactcctaggagtcctcg

SEQ ID NO: 12608 - DNA, 20 bp, Artificial sequence
  Primer
tggactcctaggagtccacg

SEQ ID NO: 12609 - DNA, 20 bp, Artificial sequence
  Primer
ccgactcctaggagtcggtg

SEQ ID NO: 12610 - DNA, 20 bp, Artificial sequence
  Primer
ccgactcctaggagtcggag

SEQ ID NO: 12611 - DNA, 20 bp, Artificial sequence
  Primer
gggactcctaggagtcccgc

SEQ ID NO: 12612 - DNA, 20 bp, Artificial sequence
  Primer
gggactcctaggagtccctc

SEQ ID NO: 12613 - DNA, 20 bp, Artificial sequence
  Primer
gggactcctaggagtcccac

SEQ ID NO: 12614 - DNA, 20 bp, Artificial sequence
  Primer
  misc_feature (1)..(2): n is a, c, g, or t
  misc_feature (17)..(20): n is a, c, g, or t
nngactccatggagtcnnnn

SEQ ID NO: 12615 - DNA, 20 bp, Artificial sequence
  Primer
cggactccatggagtccgcc

SEQ ID NO: 12616 - DNA, 20 bp, Artificial sequence
  Primer
cggactccatggagtccgct

SEQ ID NO: 12617 - DNA, 20 bp, Artificial sequence
  Primer
cggactccatggagtccgtc

SEQ ID NO: 12618 - DNA, 20 bp, Artificial sequence
  Primer
aggactccatggagtcctcc

SEQ ID NO: 12619 - DNA, 20 bp, Artificial sequence
  Primer
cagactccatggagtctgcc

SEQ ID NO: 12620 - DNA, 20 bp, Artificial sequence
  Primer
cggactccatggagtccgca

SEQ ID NO: 12621 - DNA, 20 bp, Artificial sequence
  Primer
cggactccatggagtccgac

SEQ ID NO: 12622 - DNA, 20 bp, Artificial sequence
  Primer
tggactccatggagtccacc

SEQ ID NO: 12623 - DNA, 20 bp, Artificial sequence
  Primer
ctgactccatggagtcagcc

SEQ ID NO: 12624 - DNA, 20 bp, Artificial sequence
  Primer
ccgactccatggagtcgggc

SEQ ID NO: 12625 - DNA, 20 bp, Artificial sequence
  Primer
ccgactccatggagtcgggt

SEQ ID NO: 12626 - DNA, 20 bp, Artificial sequence
  Primer
ccgactccatggagtcggtc

SEQ ID NO: 12627 - DNA, 20 bp, Artificial sequence
  Primer
acgactccatggagtcgtgc

SEQ ID NO: 12628 - DNA, 20 bp, Artificial sequence
  Primer
cagactccatggagtctggc

SEQ ID NO: 12629 - DNA, 20 bp, Artificial sequence
  Primer
ccgactccatggagtcggga

SEQ ID NO: 12630 - DNA, 20 bp, Artificial sequence
  Primer
ccgactccatggagtcggac

SEQ ID NO: 12631 - DNA, 20 bp, Artificial sequence
  Primer
ctgactccatggagtcaggc

SEQ ID NO: 12632 - DNA, 20 bp, Artificial sequence
  Primer
gcgactccatggagtcgccc

SEQ ID NO: 12633 - DNA, 20 bp, Artificial sequence
  Primer
gcgactccatggagtcgcct

SEQ ID NO: 12634 - DNA, 20 bp, Artificial sequence
  Primer
gcgactccatggagtcgctc

SEQ ID NO: 12635 - DNA, 20 bp, Artificial sequence
  Primer
acgactccatggagtcgtcc

SEQ ID NO: 12636 - DNA, 20 bp, Artificial sequence
  Primer
gagactccatggagtctccc

SEQ ID NO: 12637 - DNA, 20 bp, Artificial sequence
  Primer
gcgactccatggagtcgcca

SEQ ID NO: 12638 - DNA, 20 bp, Artificial sequence
  Primer
gcgactccatggagtcgcac

SEQ ID NO: 12639 - DNA, 20 bp, Artificial sequence
  Primer
gtgactccatggagtcaccc

SEQ ID NO: 12640 - DNA, 20 bp, Artificial sequence
  Primer
gggactccatggagtcccgt

SEQ ID NO: 12641 - DNA, 20 bp, Artificial sequence
  Primer
gggactccatggagtccctg

SEQ ID NO: 12642 - DNA, 20 bp, Artificial sequence
  Primer
aggactccatggagtcctgg

SEQ ID NO: 12643 - DNA, 20 bp, Artificial sequence
  Primer
gagactccatggagtctcgg

SEQ ID NO: 12644 - DNA, 20 bp, Artificial sequence
  Primer
gggactccatggagtcccga

SEQ ID NO: 12645 - DNA, 20 bp, Artificial sequence
  Primer
gggactccatggagtcccag

SEQ ID NO: 12646 - DNA, 20 bp, Artificial sequence
  Primer
tggactccatggagtccagg

SEQ ID NO: 12647 - DNA, 20 bp, Artificial sequence
  Primer
gtgactccatggagtcacgg

SEQ ID NO: 12648 - DNA, 20 bp, Artificial sequence
  Primer
gcgactccatggagtcgccg

SEQ ID NO: 12649 - DNA, 20 bp, Artificial sequence
  Primer
gcgactccatggagtcgctg

SEQ ID NO: 12650 - DNA, 20 bp, Artificial sequence
  Primer
acgactccatggagtcgtcg

SEQ ID NO: 12651 - DNA, 20 bp, Artificial sequence
  Primer
gagactccatggagtctccg

SEQ ID NO: 12652 - DNA, 20 bp, Artificial sequence
  Primer
gcgactccatggagtcgcag

SEQ ID NO: 12653 - DNA, 20 bp, Artificial sequence
  Primer
gtgactccatggagtcaccg

SEQ ID NO: 12654 - DNA, 20 bp, Artificial sequence
  Primer
cggactccatggagtccgtg

SEQ ID NO: 12655 - DNA, 20 bp, Artificial sequence
  Primer
cagactccatggagtctggg

SEQ ID NO: 12656 - DNA, 20 bp, Artificial sequence
  Primer
cggactccatggagtccgag

SEQ ID NO: 12657 - DNA, 20 bp, Artificial sequence
  Primer
ctgactccatggagtcaggg

SEQ ID NO: 12658 - DNA, 20 bp, Artificial sequence
  Primer
acgactccatggagtcgtgg

SEQ ID NO: 12659 - DNA, 20 bp, Artificial sequence
  Primer
ccgactccatggagtcggct

SEQ ID NO: 12660 - DNA, 20 bp, Artificial sequence
  Primer
ccgactccatggagtcggca

SEQ ID NO: 12661 - DNA, 20 bp, Artificial sequence
  Primer
gagactccatggagtctcgc

SEQ ID NO: 12662 - DNA, 20 bp, Artificial sequence
  Primer
gtgactccatggagtcacgc

SEQ ID NO: 12663 - DNA, 20 bp, Artificial sequence
  Primer
aggactccatggagtcctgc

SEQ ID NO: 12664 - DNA, 20 bp, Artificial sequence
  Primer
tggactccatggagtccagc

SEQ ID NO: 12665 - DNA, 20 bp, Artificial sequence
  Primer
aggactccatggagtcctcg

SEQ ID NO: 12666 - DNA, 20 bp, Artificial sequence
  Primer
tggactccatggagtccacg

SEQ ID NO: 12667 - DNA, 20 bp, Artificial sequence
  Primer
ccgactccatggagtcggtg

SEQ ID NO: 12668 - DNA, 20 bp, Artificial sequence
  Primer
ccgactccatggagtcggag

SEQ ID NO: 12669 - DNA, 20 bp, Artificial sequence
  Primer
gggactccatggagtcccgc

SEQ ID NO: 12670 - DNA, 20 bp, Artificial sequence
  Primer
gggactccatggagtccctc

SEQ ID NO: 12671 - DNA, 20 bp, Artificial sequence
  Primer
gggactccatggagtcccac

SEQ ID NO: 12672 - DNA, 20 bp, Artificial sequence
  Primer
  misc_feature (1)..(2): n is a, c, g, or t
  misc_feature (17)..(20): n is a, c, g, or t
nngactctcgagagtcnnnn

SEQ ID NO: 12673 - DNA, 20 bp, Artificial sequence
  Primer
cggactctcgagagtccgcc

SEQ ID NO: 12674 - DNA, 20 bp, Artificial sequence
  Primer
cggactctcgagagtccgct

SEQ ID NO: 12675 - DNA, 20 bp, Artificial sequence
  Primer
cggactctcgagagtccgtc

SEQ ID NO: 12676 - DNA, 20 bp, Artificial sequence
  Primer
aggactctcgagagtcctcc

SEQ ID NO: 12677 - DNA, 20 bp, Artificial sequence
  Primer
cagactctcgagagtctgcc

SEQ ID NO: 12678 - DNA, 20 bp, Artificial sequence
  Primer
cggactctcgagagtccgca

SEQ ID NO: 12679 - DNA, 20 bp, Artificial sequence
  Primer
cggactctcgagagtccgac

SEQ ID NO: 12680 - DNA, 20 bp, Artificial sequence
  Primer
tggactctcgagagtccacc

SEQ ID NO: 12681 - DNA, 20 bp, Artificial sequence
  Primer
ctgactctcgagagtcagcc

SEQ ID NO: 12682 - DNA, 20 bp, Artificial sequence
  Primer
ccgactctcgagagtcgggc

SEQ ID NO: 12683 - DNA, 20 bp, Artificial sequence
  Primer
ccgactctcgagagtcgggt

SEQ ID NO: 12684 - DNA, 20 bp, Artificial sequence
  Primer
ccgactctcgagagtcggtc

SEQ ID NO: 12685 - DNA, 20 bp, Artificial sequence
  Primer
acgactctcgagagtcgtgc

SEQ ID NO: 12686 - DNA, 20 bp, Artificial sequence
  Primer
cagactctcgagagtctggc

SEQ ID NO: 12687 - DNA, 20 bp, Artificial sequence
  Primer
ccgactctcgagagtcggga

SEQ ID NO: 12688 - DNA, 20 bp, Artificial sequence
  Primer
ccgactctcgagagtcggac

SEQ ID NO: 12689 - DNA, 20 bp, Artificial sequence
  Primer
ctgactctcgagagtcaggc

SEQ ID NO: 12690 - DNA, 20 bp, Artificial sequence
  Primer
gcgactctcgagagtcgccc

SEQ ID NO: 12691 - DNA, 20 bp, Artificial sequence
  Primer
gcgactctcgagagtcgcct

SEQ ID NO: 12692 - DNA, 20 bp, Artificial sequence
  Primer
gcgactctcgagagtcgctc

SEQ ID NO: 12693 - DNA, 20 bp, Artificial sequence
  Primer
acgactctcgagagtcgtcc

SEQ ID NO: 12694 - DNA, 20 bp, Artificial sequence
  Primer
gagactctcgagagtctccc

SEQ ID NO: 12695 - DNA, 20 bp, Artificial sequence
  Primer
gcgactctcgagagtcgcca

SEQ ID NO: 12696 - DNA, 20 bp, Artificial sequence
  Primer
gcgactctcgagagtcgcac

SEQ ID NO: 12697 - DNA, 20 bp, Artificial sequence
  Primer
gtgactctcgagagtcaccc

SEQ ID NO: 12698 - DNA, 20 bp, Artificial sequence
  Primer
gggactctcgagagtcccgt

SEQ ID NO: 12699 - DNA, 20 bp, Artificial sequence
  Primer
gggactctcgagagtccctg

SEQ ID NO: 12700 - DNA, 20 bp, Artificial sequence
  Primer
aggactctcgagagtcctgg

SEQ ID NO: 12701 - DNA, 20 bp, Artificial sequence
  Primer
gagactctcgagagtctcgg

SEQ ID NO: 12702 - DNA, 20 bp, Artificial sequence
  Primer
gggactctcgagagtcccga

SEQ ID NO: 12703 - DNA, 20 bp, Artificial sequence
  Primer
gggactctcgagagtcccag

SEQ ID NO: 12704 - DNA, 20 bp, Artificial sequence
  Primer
tggactctcgagagtccagg

SEQ ID NO: 12705 - DNA, 20 bp, Artificial sequence
  Primer
gtgactctcgagagtcacgg

SEQ ID NO: 12706 - DNA, 20 bp, Artificial sequence
  Primer
gcgactctcgagagtcgccg

SEQ ID NO: 12707 - DNA, 20 bp, Artificial sequence
  Primer
gcgactctcgagagtcgctg

SEQ ID NO: 12708 - DNA, 20 bp, Artificial sequence
  Primer
acgactctcgagagtcgtcg

SEQ ID NO: 12709 - DNA, 20 bp, Artificial sequence
  Primer
gagactctcgagagtctccg

SEQ ID NO: 12710 - DNA, 20 bp, Artificial sequence
  Primer
gcgactctcgagagtcgcag

SEQ ID NO: 12711 - DNA, 20 bp, Artificial sequence
  Primer
gtgactctcgagagtcaccg

SEQ ID NO: 12712 - DNA, 20 bp, Artificial sequence
  Primer
cggactctcgagagtccgtg

SEQ ID NO: 12713 - DNA, 20 bp, Artificial sequence
  Primer
cagactctcgagagtctggg

SEQ ID NO: 12714 - DNA, 20 bp, Artificial sequence
  Primer
cggactctcgagagtccgag

SEQ ID NO: 12715 - DNA, 20 bp, Artificial sequence
  Primer
ctgactctcgagagtcaggg

SEQ ID NO: 12716 - DNA, 20 bp, Artificial sequence
  Primer
acgactctcgagagtcgtgg

SEQ ID NO: 12717 - DNA, 20 bp, Artificial sequence
  Primer
ccgactctcgagagtcggct

SEQ ID NO: 12718 - DNA, 20 bp, Artificial sequence
  Primer
ccgactctcgagagtcggca

SEQ ID NO: 12719 - DNA, 20 bp, Artificial sequence
  Primer
gagactctcgagagtctcgc

SEQ ID NO: 12720 - DNA, 20 bp, Artificial sequence
  Primer
gtgactctcgagagtcacgc

SEQ ID NO: 12721 - DNA, 20 bp, Artificial sequence
  Primer
aggactctcgagagtcctgc

SEQ ID NO: 12722 - DNA, 20 bp, Artificial sequence
  Primer
tggactctcgagagtccagc

SEQ ID NO: 12723 - DNA, 20 bp, Artificial sequence
  Primer
aggactctcgagagtcctcg

SEQ ID NO: 12724 - DNA, 20 bp, Artificial sequence
  Primer
tggactctcgagagtccacg

SEQ ID NO: 12725 - DNA, 20 bp, Artificial sequence
  Primer
ccgactctcgagagtcggtg

SEQ ID NO: 12726 - DNA, 20 bp, Artificial sequence
  Primer
ccgactctcgagagtcggag

SEQ ID NO: 12727 - DNA, 20 bp, Artificial sequence
  Primer
gggactctcgagagtcccgc

SEQ ID NO: 12728 - DNA, 20 bp, Artificial sequence
  Primer
gggactctcgagagtccctc

SEQ ID NO: 12729 - DNA, 20 bp, Artificial sequence
  Primer
gggactctcgagagtcccac

SEQ ID NO: 12730 - DNA, 20 bp, Artificial sequence
  Primer
  misc_feature (1)..(2): n is a, c, g, or t
  misc_feature (17)..(20): n is a, c, g, or t
nngactcagctgagtcnnnn

SEQ ID NO: 12731 - DNA, 20 bp, Artificial sequence
  Primer
cggactcagctgagtccgcc

SEQ ID NO: 12732 - DNA, 20 bp, Artificial sequence
  Primer
cggactcagctgagtccgct

SEQ ID NO: 12733 - DNA, 20 bp, Artificial sequence
  Primer
cggactcagctgagtccgtc

SEQ ID NO: 12734 - DNA, 20 bp, Artificial sequence
  Primer
aggactcagctgagtcctcc

SEQ ID NO: 12735 - DNA, 20 bp, Artificial sequence
  Primer
cagactcagctgagtctgcc

SEQ ID NO: 12736 - DNA, 20 bp, Artificial sequence
  Primer
cggactcagctgagtccgca

SEQ ID NO: 12737 - DNA, 20 bp, Artificial sequence
  Primer
cggactcagctgagtccgac

SEQ ID NO: 12738 - DNA, 20 bp, Artificial sequence
  Primer
tggactcagctgagtccacc

SEQ ID NO: 12739 - DNA, 20 bp, Artificial sequence
  Primer
ctgactcagctgagtcagcc

SEQ ID NO: 12740 - DNA, 20 bp, Artificial sequence
  Primer
ccgactcagctgagtcgggc

SEQ ID NO: 12741 - DNA, 20 bp, Artificial sequence
  Primer
ccgactcagctgagtcgggt

SEQ ID NO: 12742 - DNA, 20 bp, Artificial sequence
  Primer
ccgactcagctgagtcggtc

SEQ ID NO: 12743 - DNA, 20 bp, Artificial sequence
  Primer
acgactcagctgagtcgtgc

SEQ ID NO: 12744 - DNA, 20 bp, Artificial sequence
  Primer
cagactcagctgagtctggc

SEQ ID NO: 12745 - DNA, 20 bp, Artificial sequence
  Primer
ccgactcagctgagtcggga

SEQ ID NO: 12746 - DNA, 20 bp, Artificial sequence
  Primer
ccgactcagctgagtcggac

SEQ ID NO: 12747 - DNA, 20 bp, Artificial sequence
  Primer
ctgactcagctgagtcaggc

SEQ ID NO: 12748 - DNA, 20 bp, Artificial sequence
  Primer
gcgactcagctgagtcgccc

SEQ ID NO: 12749 - DNA, 20 bp, Artificial sequence
  Primer
gcgactcagctgagtcgcct

SEQ ID NO: 12750 - DNA, 20 bp, Artificial sequence
  Primer
gcgactcagctgagtcgctc

SEQ ID NO: 12751 - DNA, 20 bp, Artificial sequence
  Primer
acgactcagctgagtcgtcc

SEQ ID NO: 12752 - DNA, 20 bp, Artificial sequence
  Primer
gagactcagctgagtctccc

SEQ ID NO: 12753 - DNA, 20 bp, Artificial sequence
  Primer
gcgactcagctgagtcgcca

SEQ ID NO: 12754 - DNA, 20 bp, Artificial sequence
  Primer
gcgactcagctgagtcgcac

SEQ ID NO: 12755 - DNA, 20 bp, Artificial sequence
  Primer
gtgactcagctgagtcaccc

SEQ ID NO: 12756 - DNA, 20 bp, Artificial sequence
  Primer
gggactcagctgagtcccgt

SEQ ID NO: 12757 - DNA, 20 bp, Artificial sequence
  Primer
gggactcagctgagtccctg

SEQ ID NO: 12758 - DNA, 20 bp, Artificial sequence
  Primer
aggactcagctgagtcctgg

SEQ ID NO: 12759 - DNA, 20 bp, Artificial sequence
  Primer
gagactcagctgagtctcgg

SEQ ID NO: 12760 - DNA, 20 bp, Artificial sequence
  Primer
gggactcagctgagtcccga

SEQ ID NO: 12761 - DNA, 20 bp, Artificial sequence
  Primer
gggactcagctgagtcccag

SEQ ID NO: 12762 - DNA, 20 bp, Artificial sequence
  Primer
tggactcagctgagtccagg

SEQ ID NO: 12763 - DNA, 20 bp, Artificial sequence
  Primer
gtgactcagctgagtcacgg

SEQ ID NO: 12764 - DNA, 20 bp, Artificial sequence
  Primer
gcgactcagctgagtcgccg

SEQ ID NO: 12765 - DNA, 20 bp, Artificial sequence
  Primer
gcgactcagctgagtcgctg

SEQ ID NO: 12766 - DNA, 20 bp, Artificial sequence
  Primer
acgactcagctgagtcgtcg

SEQ ID NO: 12767 - DNA, 20 bp, Artificial sequence
  Primer
gagactcagctgagtctccg

SEQ ID NO: 12768 - DNA, 20 bp, Artificial sequence
  Primer
gcgactcagctgagtcgcag

SEQ ID NO: 12769 - DNA, 20 bp, Artificial sequence
  Primer
gtgactcagctgagtcaccg

SEQ ID NO: 12770 - DNA, 20 bp, Artificial sequence
  Primer
cggactcagctgagtccgtg

SEQ ID NO: 12771 - DNA, 20 bp, Artificial sequence
  Primer
cagactcagctgagtctggg

SEQ ID NO: 12772 - DNA, 20 bp, Artificial sequence
  Primer
cggactcagctgagtccgag

SEQ ID NO: 12773 - DNA, 20 bp, Artificial sequence
  Primer
ctgactcagctgagtcaggg

SEQ ID NO: 12774 - DNA, 20 bp, Artificial sequence
  Primer
acgactcagctgagtcgtgg

SEQ ID NO: 12775 - DNA, 20 bp, Artificial sequence
  Primer
ccgactcagctgagtcggct

SEQ ID NO: 12776 - DNA, 20 bp, Artificial sequence
  Primer
ccgactcagctgagtcggca

SEQ ID NO: 12777 - DNA, 20 bp, Artificial sequence
  Primer
gagactcagctgagtctcgc

SEQ ID NO: 12778 - DNA, 20 bp, Artificial sequence
  Primer
gtgactcagctgagtcacgc

SEQ ID NO: 12779 - DNA, 20 bp, Artificial sequence
  Primer
aggactcagctgagtcctgc

SEQ ID NO: 12780 - DNA, 20 bp, Artificial sequence
  Primer
tggactcagctgagtccagc

SEQ ID NO: 12781 - DNA, 20 bp, Artificial sequence
  Primer
aggactcagctgagtcctcg

SEQ ID NO: 12782 - DNA, 20 bp, Artificial sequence
  Primer
tggactcagctgagtccacg

SEQ ID NO: 12783 - DNA, 20 bp, Artificial sequence
  Primer
ccgactcagctgagtcggtg

SEQ ID NO: 12784 - DNA, 20 bp, Artificial sequence
  Primer
ccgactcagctgagtcggag

SEQ ID NO: 12785 - DNA, 20 bp, Artificial sequence
  Primer
gggactcagctgagtcccgc

SEQ ID NO: 12786 - DNA, 20 bp, Artificial sequence
  Primer
gggactcagctgagtccctc

SEQ ID NO: 12787 - DNA, 20 bp, Artificial sequence
  Primer
gggactcagctgagtcccac

SEQ ID NO: 12788 - DNA, 20 bp, Artificial sequence
  Primer
  misc_feature (1)..(2): n is a, c, g, or t
  misc_feature (17)..(20): n is a, c, g, or t
nngactcaattgagtcnnnn

SEQ ID NO: 12789 - DNA, 20 bp, Artificial sequence
  Primer
cggactcaattgagtccgcc

SEQ ID NO: 12790 - DNA, 20 bp, Artificial sequence
  Primer
cggactcaattgagtccgct

SEQ ID NO: 12791 - DNA, 20 bp, Artificial sequence
  Primer
cggactcaattgagtccgtc

SEQ ID NO: 12792 - DNA, 20 bp, Artificial sequence
  Primer
aggactcaattgagtcctcc

SEQ ID NO: 12793 - DNA, 20 bp, Artificial sequence
  Primer
cagactcaattgagtctgcc

SEQ ID NO: 12794 - DNA, 20 bp, Artificial sequence
  Primer
cggactcaattgagtccgca

SEQ ID NO: 12795 - DNA, 20 bp, Artificial sequence
  Primer
cggactcaattgagtccgac

SEQ ID NO: 12796 - DNA, 20 bp, Artificial sequence
  Primer
tggactcaattgagtccacc

SEQ ID NO: 12797 - DNA, 20 bp, Artificial sequence
  Primer
ctgactcaattgagtcagcc

SEQ ID NO: 12798 - DNA, 20 bp, Artificial sequence
  Primer
ccgactcaattgagtcgggc

SEQ ID NO: 12799 - DNA, 20 bp, Artificial sequence
  Primer
ccgactcaattgagtcgggt

SEQ ID NO: 12800 - DNA, 20 bp, Artificial sequence
  Primer
ccgactcaattgagtcggtc

SEQ ID NO: 12801 - DNA, 20 bp, Artificial sequence
  Primer
acgactcaattgagtcgtgc

SEQ ID NO: 12802 - DNA, 20 bp, Artificial sequence
  Primer
cagactcaattgagtctggc

SEQ ID NO: 12803 - DNA, 20 bp, Artificial sequence
  Primer
ccgactcaattgagtcggga

SEQ ID NO: 12804 - DNA, 20 bp, Artificial sequence
  Primer
ccgactcaattgagtcggac

SEQ ID NO: 12805 - DNA, 20 bp, Artificial sequence
  Primer
ctgactcaattgagtcaggc

SEQ ID NO: 12806 - DNA, 20 bp, Artificial sequence
  Primer
gcgactcaattgagtcgccc

SEQ ID NO: 12807 - DNA, 20 bp, Artificial sequence
  Primer
gcgactcaattgagtcgcct

SEQ ID NO: 12808 - DNA, 20 bp, Artificial sequence
  Primer
gcgactcaattgagtcgctc

SEQ ID NO: 12809 - DNA, 20 bp, Artificial sequence
  Primer
acgactcaattgagtcgtcc

SEQ ID NO: 12810 - DNA, 20 bp, Artificial sequence
  Primer
gagactcaattgagtctccc

SEQ ID NO: 12811 - DNA, 20 bp, Artificial sequence
  Primer
gcgactcaattgagtcgcca

SEQ ID NO: 12812 - DNA, 20 bp, Artificial sequence
  Primer
gcgactcaattgagtcgcac

SEQ ID NO: 12813 - DNA, 20 bp, Artificial sequence
  Primer
gtgactcaattgagtcaccc

SEQ ID NO: 12814 - DNA, 20 bp, Artificial sequence
  Primer
gggactcaattgagtcccgt

SEQ ID NO: 12815 - DNA, 20 bp, Artificial sequence
  Primer
gggactcaattgagtccctg

SEQ ID NO: 12816 - DNA, 20 bp, Artificial sequence
  Primer
aggactcaattgagtcctgg

SEQ ID NO: 12817 - DNA, 20 bp, Artificial sequence
  Primer
gagactcaattgagtctcgg

SEQ ID NO: 12818 - DNA, 20 bp, Artificial sequence
  Primer
gggactcaattgagtcccga

SEQ ID NO: 12819 - DNA, 20 bp, Artificial sequence
  Primer
gggactcaattgagtcccag

SEQ ID NO: 12820 - DNA, 20 bp, Artificial sequence
  Primer
tggactcaattgagtccagg

SEQ ID NO: 12821 - DNA, 20 bp, Artificial sequence
  Primer
gtgactcaattgagtcacgg

SEQ ID NO: 12822 - DNA, 20 bp, Artificial sequence
  Primer
gcgactcaattgagtcgccg

SEQ ID NO: 12823 - DNA, 20 bp, Artificial sequence
  Primer
gcgactcaattgagtcgctg

SEQ ID NO: 12824 - DNA, 20 bp, Artificial sequence
  Primer
acgactcaattgagtcgtcg

SEQ ID NO: 12825 - DNA, 20 bp, Artificial sequence
  Primer
gagactcaattgagtctccg

SEQ ID NO: 12826 - DNA, 20 bp, Artificial sequence
  Primer
gcgactcaattgagtcgcag

SEQ ID NO: 12827 - DNA, 20 bp, Artificial sequence
  Primer
gtgactcaattgagtcaccg

SEQ ID NO: 12828 - DNA, 20 bp, Artificial sequence
  Primer
cggactcaattgagtccgtg

SEQ ID NO: 12829 - DNA, 20 bp, Artificial sequence
  Primer
cagactcaattgagtctggg

SEQ ID NO: 12830 - DNA, 20 bp, Artificial sequence
  Primer
cggactcaattgagtccgag

SEQ ID NO: 12831 - DNA, 20 bp, Artificial sequence
  Primer
ctgactcaattgagtcaggg

SEQ ID NO: 12832 - DNA, 20 bp, Artificial sequence
  Primer
acgactcaattgagtcgtgg

SEQ ID NO: 12833 - DNA, 20 bp, Artificial sequence
  Primer
ccgactcaattgagtcggct

SEQ ID NO: 12834 - DNA, 20 bp, Artificial sequence
  Primer
ccgactcaattgagtcggca

SEQ ID NO: 12835 - DNA, 20 bp, Artificial sequence
  Primer
gagactcaattgagtctcgc

SEQ ID NO: 12836 - DNA, 20 bp, Artificial sequence
  Primer
gtgactcaattgagtcacgc

SEQ ID NO: 12837 - DNA, 20 bp, Artificial sequence
  Primer
aggactcaattgagtcctgc

SEQ ID NO: 12838 - DNA, 20 bp, Artificial sequence
  Primer
tggactcaattgagtccagc

SEQ ID NO: 12839 - DNA, 20 bp, Artificial sequence
  Primer
aggactcaattgagtcctcg

SEQ ID NO: 12840 - DNA, 20 bp, Artificial sequence
  Primer
tggactcaattgagtccacg

SEQ ID NO: 12841 - DNA, 20 bp, Artificial sequence
  Primer
ccgactcaattgagtcggtg

SEQ ID NO: 12842 - DNA, 20 bp, Artificial sequence
  Primer
ccgactcaattgagtcggag

SEQ ID NO: 12843 - DNA, 20 bp, Artificial sequence
  Primer
gggactcaattgagtcccgc

SEQ ID NO: 12844 - DNA, 20 bp, Artificial sequence
  Primer
gggactcaattgagtccctc

SEQ ID NO: 12845 - DNA, 20 bp, Artificial sequence
  Primer
gggactcaattgagtcccac

SEQ ID NO: 12846 - DNA, 20 bp, Artificial sequence
  Primer
  misc_feature (1)..(2): n is a, c, g, or t
  misc_feature (17)..(20): n is a, c, g, or t
nngactctatagagtcnnnn

SEQ ID NO: 12847 - DNA, 20 bp, Artificial sequence
  Primer
cggactctatagagtccgcc

SEQ ID NO: 12848 - DNA, 20 bp, Artificial sequence
  Primer
cggactctatagagtccgct

SEQ ID NO: 12849 - DNA, 20 bp, Artificial sequence
  Primer
cggactctatagagtccgtc

SEQ ID NO: 12850 - DNA, 20 bp, Artificial sequence
  Primer
aggactctatagagtcctcc

SEQ ID NO: 12851 - DNA, 20 bp, Artificial sequence
  Primer
cagactctatagagtctgcc

SEQ ID NO: 12852 - DNA, 20 bp, Artificial sequence
  Primer
cggactctatagagtccgca

SEQ ID NO: 12853 - DNA, 20 bp, Artificial sequence
  Primer
cggactctatagagtccgac

SEQ ID NO: 12854 - DNA, 20 bp, Artificial sequence
  Primer
tggactctatagagtccacc

SEQ ID NO: 12855 - DNA, 20 bp, Artificial sequence
  Primer
ctgactctatagagtcagcc

SEQ ID NO: 12856 - DNA, 20 bp, Artificial sequence
  Primer
ccgactctatagagtcgggc

SEQ ID NO: 12857 - DNA, 20 bp, Artificial sequence
  Primer
ccgactctatagagtcgggt

SEQ ID NO: 12858 - DNA, 20 bp, Artificial sequence
  Primer
ccgactctatagagtcggtc

SEQ ID NO: 12859 - DNA, 20 bp, Artificial sequence
  Primer
acgactctatagagtcgtgc

SEQ ID NO: 12860 - DNA, 20 bp, Artificial sequence
  Primer
cagactctatagagtctggc

SEQ ID NO: 12861 - DNA, 20 bp, Artificial sequence
  Primer
ccgactctatagagtcggga

SEQ ID NO: 12862 - DNA, 20 bp, Artificial sequence
  Primer
ccgactctatagagtcggac

SEQ ID NO: 12863 - DNA, 20 bp, Artificial sequence
  Primer
ctgactctatagagtcaggc

SEQ ID NO: 12864 - DNA, 20 bp, Artificial sequence
  Primer
gcgactctatagagtcgccc

SEQ ID NO: 12865 - DNA, 20 bp, Artificial sequence
  Primer
gcgactctatagagtcgcct

SEQ ID NO: 12866 - DNA, 20 bp, Artificial sequence
  Primer
gcgactctatagagtcgctc

SEQ ID NO: 12867 - DNA, 20 bp, Artificial sequence
  Primer
acgactctatagagtcgtcc

SEQ ID NO: 12868 - DNA, 20 bp, Artificial sequence
  Primer
gagactctatagagtctccc

SEQ ID NO: 12869 - DNA, 20 bp, Artificial sequence
  Primer
gcgactctatagagtcgcca

SEQ ID NO: 12870 - DNA, 20 bp, Artificial sequence
  Primer
gcgactctatagagtcgcac

SEQ ID NO: 12871 - DNA, 20 bp, Artificial sequence
  Primer
gtgactctatagagtcaccc

SEQ ID NO: 12872 - DNA, 20 bp, Artificial sequence
  Primer
gggactctatagagtcccgt

SEQ ID NO: 12873 - DNA, 20 bp, Artificial sequence
  Primer
gggactctatagagtccctg

SEQ ID NO: 12874 - DNA, 20 bp, Artificial sequence
  Primer
aggactctatagagtcctgg

SEQ ID NO: 12875 - DNA, 20 bp, Artificial sequence
  Primer
gagactctatagagtctcgg

SEQ ID NO: 12876 - DNA, 20 bp, Artificial sequence
  Primer
gggactctatagagtcccga

SEQ ID NO: 12877 - DNA, 20 bp, Artificial sequence
  Primer
gggactctatagagtcccag

SEQ ID NO: 12878 - DNA, 20 bp, Artificial sequence
  Primer
tggactctatagagtccagg

SEQ ID NO: 12879 - DNA, 20 bp, Artificial sequence
  Primer
gtgactctatagagtcacgg

SEQ ID NO: 12880 - DNA, 20 bp, Artificial sequence
  Primer
gcgactctatagagtcgccg

SEQ ID NO: 12881 - DNA, 20 bp, Artificial sequence
  Primer
gcgactctatagagtcgctg

SEQ ID NO: 12882 - DNA, 20 bp, Artificial sequence
  Primer
acgactctatagagtcgtcg

SEQ ID NO: 12883 - DNA, 20 bp, Artificial sequence
  Primer
gagactctatagagtctccg

SEQ ID NO: 12884 - DNA, 20 bp, Artificial sequence
  Primer
gcgactctatagagtcgcag

SEQ ID NO: 12885 - DNA, 20 bp, Artificial sequence
  Primer
gtgactctatagagtcaccg

SEQ ID NO: 12886 - DNA, 20 bp, Artificial sequence
  Primer
cggactctatagagtccgtg

SEQ ID NO: 12887 - DNA, 20 bp, Artificial sequence
  Primer
cagactctatagagtctggg

SEQ ID NO: 12888 - DNA, 20 bp, Artificial sequence
  Primer
cggactctatagagtccgag

SEQ ID NO: 12889 - DNA, 20 bp, Artificial sequence
  Primer
ctgactctatagagtcaggg

SEQ ID NO: 12890 - DNA, 20 bp, Artificial sequence
  Primer
acgactctatagagtcgtgg

SEQ ID NO: 12891 - DNA, 20 bp, Artificial sequence
  Primer
ccgactctatagagtcggct

SEQ ID NO: 12892 - DNA, 20 bp, Artificial sequence
  Primer
ccgactctatagagtcggca

SEQ ID NO: 12893 - DNA, 20 bp, Artificial sequence
  Primer
gagactctatagagtctcgc

SEQ ID NO: 12894 - DNA, 20 bp, Artificial sequence
  Primer
gtgactctatagagtcacgc

SEQ ID NO: 12895 - DNA, 20 bp, Artificial sequence
  Primer
aggactctatagagtcctgc

SEQ ID NO: 12896 - DNA, 20 bp, Artificial sequence
  Primer
tggactctatagagtccagc

SEQ ID NO: 12897 - DNA, 20 bp, Artificial sequence
  Primer
aggactctatagagtcctcg

SEQ ID NO: 12898 - DNA, 20 bp, Artificial sequence
  Primer
tggactctatagagtccacg

SEQ ID NO: 12899 - DNA, 20 bp, Artificial sequence
  Primer
ccgactctatagagtcggtg

SEQ ID NO: 12900 - DNA, 20 bp, Artificial sequence
  Primer
ccgactctatagagtcggag

SEQ ID NO: 12901 - DNA, 20 bp, Artificial sequence
  Primer
gggactctatagagtcccgc

SEQ ID NO: 12902 - DNA, 20 bp, Artificial sequence
  Primer
gggactctatagagtccctc

SEQ ID NO: 12903 - DNA, 20 bp, Artificial sequence
  Primer
gggactctatagagtcccac

SEQ ID NO: 12904 - DNA, 20 bp, Artificial sequence
  Primer
  misc_feature (1)..(2): n is a, c, g, or t
  misc_feature (17)..(20): n is a, c, g, or t
nngactcatatgagtcnnnn

SEQ ID NO: 12905 - DNA, 20 bp, Artificial sequence
  Primer
cggactcatatgagtccgcc

SEQ ID NO: 12906 - DNA, 20 bp, Artificial sequence
  Primer
cggactcatatgagtccgct

SEQ ID NO: 12907 - DNA, 20 bp, Artificial sequence
  Primer
cggactcatatgagtccgtc

SEQ ID NO: 12908 - DNA, 20 bp, Artificial sequence
  Primer
aggactcatatgagtcctcc

SEQ ID NO: 12909 - DNA, 20 bp, Artificial sequence
  Primer
cagactcatatgagtctgcc

SEQ ID NO: 12910 - DNA, 20 bp, Artificial sequence
  Primer
cggactcatatgagtccgca

SEQ ID NO: 12911 - DNA, 20 bp, Artificial sequence
  Primer
cggactcatatgagtccgac

SEQ ID NO: 12912 - DNA, 20 bp, Artificial sequence
  Primer
tggactcatatgagtccacc

SEQ ID NO: 12913 - DNA, 20 bp, Artificial sequence
  Primer
ctgactcatatgagtcagcc

SEQ ID NO: 12914 - DNA, 20 bp, Artificial sequence
  Primer
ccgactcatatgagtcgggc

SEQ ID NO: 12915 - DNA, 20 bp, Artificial sequence
  Primer
ccgactcatatgagtcgggt

SEQ ID NO: 12916 - DNA, 20 bp, Artificial sequence
  Primer
ccgactcatatgagtcggtc

SEQ ID NO: 12917 - DNA, 20 bp, Artificial sequence
  Primer
acgactcatatgagtcgtgc

SEQ ID NO: 12918 - DNA, 20 bp, Artificial sequence
  Primer
cagactcatatgagtctggc

SEQ ID NO: 12919 - DNA, 20 bp, Artificial sequence
  Primer
ccgactcatatgagtcggga

SEQ ID NO: 12920 - DNA, 20 bp, Artificial sequence
  Primer
ccgactcatatgagtcggac

SEQ ID NO: 12921 - DNA, 20 bp, Artificial sequence
  Primer
ctgactcatatgagtcaggc

SEQ ID NO: 12922 - DNA, 20 bp, Artificial sequence
  Primer
gcgactcatatgagtcgccc

SEQ ID NO: 12923 - DNA, 20 bp, Artificial sequence
  Primer
gcgactcatatgagtcgcct

SEQ ID NO: 12924 - DNA, 20 bp, Artificial sequence
  Primer
gcgactcatatgagtcgctc

SEQ ID NO: 12925 - DNA, 20 bp, Artificial sequence
  Primer
acgactcatatgagtcgtcc

SEQ ID NO: 12926 - DNA, 20 bp, Artificial sequence
  Primer
gagactcatatgagtctccc

SEQ ID NO: 12927 - DNA, 20 bp, Artificial sequence
  Primer
gcgactcatatgagtcgcca

SEQ ID NO: 12928 - DNA, 20 bp, Artificial sequence
  Primer
gcgactcatatgagtcgcac

SEQ ID NO: 12929 - DNA, 20 bp, Artificial sequence
  Primer
gtgactcatatgagtcaccc

SEQ ID NO: 12930 - DNA, 20 bp, Artificial sequence
  Primer
gggactcatatgagtcccgt

SEQ ID NO: 12931 - DNA, 20 bp, Artificial sequence
  Primer
gggactcatatgagtccctg

SEQ ID NO: 12932 - DNA, 20 bp, Artificial sequence
  Primer
aggactcatatgagtcctgg

SEQ ID NO: 12933 - DNA, 20 bp, Artificial sequence
  Primer
gagactcatatgagtctcgg

SEQ ID NO: 12934 - DNA, 20 bp, Artificial sequence
  Primer
gggactcatatgagtcccga

SEQ ID NO: 12935 - DNA, 20 bp, Artificial sequence
  Primer
gggactcatatgagtcccag

SEQ ID NO: 12936 - DNA, 20 bp, Artificial sequence
  Primer
tggactcatatgagtccagg

SEQ ID NO: 12937 - DNA, 20 bp, Artificial sequence
  Primer
gtgactcatatgagtcacgg

SEQ ID NO: 12938 - DNA, 20 bp, Artificial sequence
  Primer
gcgactcatatgagtcgccg

SEQ ID NO: 12939 - DNA, 20 bp, Artificial sequence
  Primer
gcgactcatatgagtcgctg

SEQ ID NO: 12940 - DNA, 20 bp, Artificial sequence
  Primer
acgactcatatgagtcgtcg

SEQ ID NO: 12941 - DNA, 20 bp, Artificial sequence
  Primer
gagactcatatgagtctccg

SEQ ID NO: 12942 - DNA, 20 bp, Artificial sequence
  Primer
gcgactcatatgagtcgcag

SEQ ID NO: 12943 - DNA, 20 bp, Artificial sequence
  Primer
gtgactcatatgagtcaccg

SEQ ID NO: 12944 - DNA, 20 bp, Artificial sequence
  Primer
cggactcatatgagtccgtg

SEQ ID NO: 12945 - DNA, 20 bp, Artificial sequence
  Primer
cagactcatatgagtctggg

SEQ ID NO: 12946 - DNA, 20 bp, Artificial sequence
  Primer
cggactcatatgagtccgag

SEQ ID NO: 12947 - DNA, 20 bp, Artificial sequence
  Primer
ctgactcatatgagtcaggg

SEQ ID NO: 12948 - DNA, 20 bp, Artificial sequence
  Primer
acgactcatatgagtcgtgg

SEQ ID NO: 12949 - DNA, 20 bp, Artificial sequence
  Primer
ccgactcatatgagtcggct

SEQ ID NO: 12950 - DNA, 20 bp, Artificial sequence
  Primer
ccgactcatatgagtcggca

SEQ ID NO: 12951 - DNA, 20 bp, Artificial sequence
  Primer
gagactcatatgagtctcgc

SEQ ID NO: 12952 - DNA, 20 bp, Artificial sequence
  Primer
gtgactcatatgagtcacgc

SEQ ID NO: 12953 - DNA, 20 bp, Artificial sequence
  Primer
aggactcatatgagtcctgc

SEQ ID NO: 12954 - DNA, 20 bp, Artificial sequence
  Primer
tggactcatatgagtccagc

SEQ ID NO: 12955 - DNA, 20 bp, Artificial sequence
  Primer
aggactcatatgagtcctcg

SEQ ID NO: 12956 - DNA, 20 bp, Artificial sequence
  Primer
tggactcatatgagtccacg

SEQ ID NO: 12957 - DNA, 20 bp, Artificial sequence
  Primer
ccgactcatatgagtcggtg

SEQ ID NO: 12958 - DNA, 20 bp, Artificial sequence
  Primer
ccgactcatatgagtcggag

SEQ ID NO: 12959 - DNA, 20 bp, Artificial sequence
  Primer
gggactcatatgagtcccgc

SEQ ID NO: 12960 - DNA, 20 bp, Artificial sequence
  Primer
gggactcatatgagtccctc

SEQ ID NO: 12961 - DNA, 20 bp, Artificial sequence
  Primer
gggactcatatgagtcccac

SEQ ID NO: 12962 - DNA, 20 bp, Artificial sequence
  Primer
  misc_feature (1)..(2): n is a, c, g, or t
  misc_feature (17)..(20): n is a, c, g, or t
nngactcttaagagtcnnnn

SEQ ID NO: 12963 - DNA, 20 bp, Artificial sequence
  Primer
cggactcttaagagtccgcc

SEQ ID NO: 12964 - DNA, 20 bp, Artificial sequence
  Primer
cggactcttaagagtccgct

SEQ ID NO: 12965 - DNA, 20 bp, Artificial sequence
  Primer
cggactcttaagagtccgtc

SEQ ID NO: 12966 - DNA, 20 bp, Artificial sequence
  Primer
aggactcttaagagtcctcc

SEQ ID NO: 12967 - DNA, 20 bp, Artificial sequence
  Primer
cagactcttaagagtctgcc

SEQ ID NO: 12968 - DNA, 20 bp, Artificial sequence
  Primer
cggactcttaagagtccgca

SEQ ID NO: 12969 - DNA, 20 bp, Artificial sequence
  Primer
cggactcttaagagtccgac

SEQ ID NO: 12970 - DNA, 20 bp, Artificial sequence
  Primer
tggactcttaagagtccacc

SEQ ID NO: 12971 - DNA, 20 bp, Artificial sequence
  Primer
ctgactcttaagagtcagcc

SEQ ID NO: 12972 - DNA, 20 bp, Artificial sequence
  Primer
ccgactcttaagagtcgggc

SEQ ID NO: 12973 - DNA, 20 bp, Artificial sequence
  Primer
ccgactcttaagagtcgggt

SEQ ID NO: 12974 - DNA, 20 bp, Artificial sequence
  Primer
ccgactcttaagagtcggtc

SEQ ID NO: 12975 - DNA, 20 bp, Artificial sequence
  Primer
acgactcttaagagtcgtgc

SEQ ID NO: 12976 - DNA, 20 bp, Artificial sequence
  Primer
cagactcttaagagtctggc

SEQ ID NO: 12977 - DNA, 20 bp, Artificial sequence
  Primer
ccgactcttaagagtcggga

SEQ ID NO: 12978 - DNA, 20 bp, Artificial sequence
  Primer
ccgactcttaagagtcggac

SEQ ID NO: 12979 - DNA, 20 bp, Artificial sequence
  Primer
ctgactcttaagagtcaggc

SEQ ID NO: 12980 - DNA, 20 bp, Artificial sequence
  Primer
gcgactcttaagagtcgccc

SEQ ID NO: 12981 - DNA, 20 bp, Artificial sequence
  Primer
gcgactcttaagagtcgcct

SEQ ID NO: 12982 - DNA, 20 bp, Artificial sequence
  Primer
gcgactcttaagagtcgctc

SEQ ID NO: 12983 - DNA, 20 bp, Artificial sequence
  Primer
acgactcttaagagtcgtcc

SEQ ID NO: 12984 - DNA, 20 bp, Artificial sequence
  Primer
gagactcttaagagtctccc

SEQ ID NO: 12985 - DNA, 20 bp, Artificial sequence
  Primer
gcgactcttaagagtcgcca

SEQ ID NO: 12986 - DNA, 20 bp, Artificial sequence
  Primer
gcgactcttaagagtcgcac

SEQ ID NO: 12987 - DNA, 20 bp, Artificial sequence
  Primer
gtgactcttaagagtcaccc

SEQ ID NO: 12988 - DNA, 20 bp, Artificial sequence
  Primer
gggactcttaagagtcccgt

SEQ ID NO: 12989 - DNA, 20 bp, Artificial sequence
  Primer
gggactcttaagagtccctg

SEQ ID NO: 12990 - DNA, 20 bp, Artificial sequence
  Primer
aggactcttaagagtcctgg

SEQ ID NO: 12991 - DNA, 20 bp, Artificial sequence
  Primer
gagactcttaagagtctcgg

SEQ ID NO: 12992 - DNA, 20 bp, Artificial sequence
  Primer
gggactcttaagagtcccga

SEQ ID NO: 12993 - DNA, 20 bp, Artificial sequence
  Primer
gggactcttaagagtcccag

SEQ ID NO: 12994 - DNA, 20 bp, Artificial sequence
  Primer
tggactcttaagagtccagg

SEQ ID NO: 12995 - DNA, 20 bp, Artificial sequence
  Primer
gtgactcttaagagtcacgg

SEQ ID NO: 12996 - DNA, 20 bp, Artificial sequence
  Primer
gcgactcttaagagtcgccg

SEQ ID NO: 12997 - DNA, 20 bp, Artificial sequence
  Primer
gcgactcttaagagtcgctg

SEQ ID NO: 12998 - DNA, 20 bp, Artificial sequence
  Primer
acgactcttaagagtcgtcg

SEQ ID NO: 12999 - DNA, 20 bp, Artificial sequence
  Primer
gagactcttaagagtctccg

SEQ ID NO: 13000 - DNA, 20 bp, Artificial sequence
  Primer
gcgactcttaagagtcgcag

SEQ ID NO: 13001 - DNA, 20 bp, Artificial sequence
  Primer
gtgactcttaagagtcaccg

SEQ ID NO: 13002 - DNA, 20 bp, Artificial sequence
  Primer
cggactcttaagagtccgtg

SEQ ID NO: 13003 - DNA, 20 bp, Artificial sequence
  Primer
cagactcttaagagtctggg

SEQ ID NO: 13004 - DNA, 20 bp, Artificial sequence
  Primer
cggactcttaagagtccgag

SEQ ID NO: 13005 - DNA, 20 bp, Artificial sequence
  Primer
ctgactcttaagagtcaggg

SEQ ID NO: 13006 - DNA, 20 bp, Artificial sequence
  Primer
acgactcttaagagtcgtgg

SEQ ID NO: 13007 - DNA, 20 bp, Artificial sequence
  Primer
ccgactcttaagagtcggct

SEQ ID NO: 13008 - DNA, 20 bp, Artificial sequence
  Primer
ccgactcttaagagtcggca

SEQ ID NO: 13009 - DNA, 20 bp, Artificial sequence
  Primer
gagactcttaagagtctcgc

SEQ ID NO: 13010 - DNA, 20 bp, Artificial sequence
  Primer
gtgactcttaagagtcacgc

SEQ ID NO: 13011 - DNA, 20 bp, Artificial sequence
  Primer
aggactcttaagagtcctgc

SEQ ID NO: 13012 - DNA, 20 bp, Artificial sequence
  Primer
tggactcttaagagtccagc

SEQ ID NO: 13013 - DNA, 20 bp, Artificial sequence
  Primer
aggactcttaagagtcctcg

SEQ ID NO: 13014 - DNA, 20 bp, Artificial sequence
  Primer
tggactcttaagagtccacg

SEQ ID NO: 13015 - DNA, 20 bp, Artificial sequence
  Primer
ccgactcttaagagtcggtg

SEQ ID NO: 13016 - DNA, 20 bp, Artificial sequence
  Primer
ccgactcttaagagtcggag

SEQ ID NO: 13017 - DNA, 20 bp, Artificial sequence
  Primer
gggactcttaagagtcccgc

SEQ ID NO: 13018 - DNA, 20 bp, Artificial sequence
  Primer
gggactcttaagagtccctc

SEQ ID NO: 13019 - DNA, 20 bp, Artificial sequence
  Primer
gggactcttaagagtcccac

SEQ ID NO: 13020 - DNA, 19 bp, Artificial sequence
  Primer
  misc_feature (1)..(1): n is a, c, g, or t
  misc_feature (16)..(19): n is a, c, g, or t
ngactccgcggagtcnnnn

SEQ ID NO: 13021 - DNA, 19 bp, Artificial sequence
  Primer
ggactccgcggagtccgcc

SEQ ID NO: 13022 - DNA, 19 bp, Artificial sequence
  Primer
ggactccgcggagtccgct

SEQ ID NO: 13023 - DNA, 19 bp, Artificial sequence
  Primer
ggactccgcggagtccgtc

SEQ ID NO: 13024 - DNA, 19 bp, Artificial sequence
  Primer
ggactccgcggagtcctcc

SEQ ID NO: 13025 - DNA, 19 bp, Artificial sequence
  Primer
agactccgcggagtctgcc

SEQ ID NO: 13026 - DNA, 19 bp, Artificial sequence
  Primer
ggactccgcggagtccgca

SEQ ID NO: 13027 - DNA, 19 bp, Artificial sequence
  Primer
ggactccgcggagtccgac

SEQ ID NO: 13028 - DNA, 19 bp, Artificial sequence
  Primer
ggactccgcggagtccacc

SEQ ID NO: 13029 - DNA, 19 bp, Artificial sequence
  Primer
tgactccgcggagtcagcc

SEQ ID NO: 13030 - DNA, 19 bp, Artificial sequence
  Primer
cgactccgcggagtcgggc

SEQ ID NO: 13031 - DNA, 19 bp, Artificial sequence
  Primer
cgactccgcggagtcgggt

SEQ ID NO: 13032 - DNA, 19 bp, Artificial sequence
  Primer
cgactccgcggagtcggtc

SEQ ID NO: 13033 - DNA, 19 bp, Artificial sequence
  Primer
cgactccgcggagtcgtgc

SEQ ID NO: 13034 - DNA, 19 bp, Artificial sequence
  Primer
agactccgcggagtctggc

SEQ ID NO: 13035 - DNA, 19 bp, Artificial sequence
  Primer
cgactccgcggagtcggga

SEQ ID NO: 13036 - DNA, 19 bp, Artificial sequence
  Primer
cgactccgcggagtcggac

SEQ ID NO: 13037 - DNA, 19 bp, Artificial sequence
  Primer
tgactccgcggagtcaggc

SEQ ID NO: 13038 - DNA, 19 bp, Artificial sequence
  Primer
cgactccgcggagtcgccc

SEQ ID NO: 13039 - DNA, 19 bp, Artificial sequence
  Primer
cgactccgcggagtcgcct

SEQ ID NO: 13040 - DNA, 19 bp, Artificial sequence
  Primer
cgactccgcggagtcgctc

SEQ ID NO: 13041 - DNA, 19 bp, Artificial sequence
  Primer
cgactccgcggagtcgtcc

SEQ ID NO: 13042 - DNA, 19 bp, Artificial sequence
  Primer
agactccgcggagtctccc

SEQ ID NO: 13043 - DNA, 19 bp, Artificial sequence
  Primer
cgactccgcggagtcgcca

SEQ ID NO: 13044 - DNA, 19 bp, Artificial sequence
  Primer
cgactccgcggagtcgcac

SEQ ID NO: 13045 - DNA, 19 bp, Artificial sequence
  Primer
tgactccgcggagtcaccc

SEQ ID NO: 13046 - DNA, 19 bp, Artificial sequence
  Primer
ggactccgcggagtcccgt

SEQ ID NO: 13047 - DNA, 19 bp, Artificial sequence
  Primer
ggactccgcggagtccctg

SEQ ID NO: 13048 - DNA, 19 bp, Artificial sequence
  Primer
ggactccgcggagtcctgg

SEQ ID NO: 13049 - DNA, 19 bp, Artificial sequence
  Primer
agactccgcggagtctcgg

SEQ ID NO: 13050 - DNA, 19 bp, Artificial sequence
  Primer
ggactccgcggagtcccga

SEQ ID NO: 13051 - DNA, 19 bp, Artificial sequence
  Primer
ggactccgcggagtcccag

SEQ ID NO: 13052 - DNA, 19 bp, Artificial sequence
  Primer
ggactccgcggagtccagg

SEQ ID NO: 13053 - DNA, 19 bp, Artificial sequence
  Primer
tgactccgcggagtcacgg

SEQ ID NO: 13054 - DNA, 19 bp, Artificial sequence
  Primer
cgactccgcggagtcgccg

SEQ ID NO: 13055 - DNA, 19 bp, Artificial sequence
  Primer
cgactccgcggagtcgctg

SEQ ID NO: 13056 - DNA, 19 bp, Artificial sequence
  Primer
cgactccgcggagtcgtcg

SEQ ID NO: 13057 - DNA, 19 bp, Artificial sequence
  Primer
agactccgcggagtctccg

SEQ ID NO: 13058 - DNA, 19 bp, Artificial sequence
  Primer
cgactccgcggagtcgcag

SEQ ID NO: 13059 - DNA, 19 bp, Artificial sequence
  Primer
tgactccgcggagtcaccg

SEQ ID NO: 13060 - DNA, 19 bp, Artificial sequence
  Primer
ggactccgcggagtccgtg

SEQ ID NO: 13061 - DNA, 19 bp, Artificial sequence
  Primer
agactccgcggagtctggg

SEQ ID NO: 13062 - DNA, 19 bp, Artificial sequence
  Primer
ggactccgcggagtccgag

SEQ ID NO: 13063 - DNA, 19 bp, Artificial sequence
  Primer
tgactccgcggagtcaggg

SEQ ID NO: 13064 - DNA, 19 bp, Artificial sequence
  Primer
cgactccgcggagtcgtgg

SEQ ID NO: 13065 - DNA, 19 bp, Artificial sequence
  Primer
cgactccgcggagtcggct

SEQ ID NO: 13066 - DNA, 19 bp, Artificial sequence
  Primer
cgactccgcggagtcggca

SEQ ID NO: 13067 - DNA, 19 bp, Artificial sequence
  Primer
agactccgcggagtctcgc

SEQ ID NO: 13068 - DNA, 19 bp, Artificial sequence
  Primer
tgactccgcggagtcacgc

SEQ ID NO: 13069 - DNA, 19 bp, Artificial sequence
  Primer
ggactccgcggagtcctgc

SEQ ID NO: 13070 - DNA, 19 bp, Artificial sequence
  Primer
ggactccgcggagtccagc

SEQ ID NO: 13071 - DNA, 19 bp, Artificial sequence
  Primer
ggactccgcggagtcctcg

SEQ ID NO: 13072 - DNA, 19 bp, Artificial sequence
  Primer
ggactccgcggagtccacg

SEQ ID NO: 13073 - DNA, 19 bp, Artificial sequence
  Primer
cgactccgcggagtcggtg

SEQ ID NO: 13074 - DNA, 19 bp, Artificial sequence
  Primer
cgactccgcggagtcggag

SEQ ID NO: 13075 - DNA, 19 bp, Artificial sequence
  Primer
ggactccgcggagtcccgc

SEQ ID NO: 13076 - DNA, 19 bp, Artificial sequence
  Primer
ggactccgcggagtccctc

SEQ ID NO: 13077 - DNA, 19 bp, Artificial sequence
  Primer
ggactccgcggagtcccac

SEQ ID NO: 13078 - DNA, 19 bp, Artificial sequence
  Primer
  misc_feature (1)..(1): n is a, c, g, or t
  misc_feature (16)..(19): n is a, c, g, or t
ngactctgcagagtcnnnn

SEQ ID NO: 13079 - DNA, 19 bp, Artificial sequence
  Primer
ggactctgcagagtccgcc

SEQ ID NO: 13080 - DNA, 19 bp, Artificial sequence
  Primer
ggactctgcagagtccgct

SEQ ID NO: 13081 - DNA, 19 bp, Artificial sequence
  Primer
ggactctgcagagtccgtc

SEQ ID NO: 13082 - DNA, 19 bp, Artificial sequence
  Primer
ggactctgcagagtcctcc

SEQ ID NO: 13083 - DNA, 19 bp, Artificial sequence
  Primer
agactctgcagagtctgcc

SEQ ID NO: 13084 - DNA, 19 bp, Artificial sequence
  Primer
ggactctgcagagtccgca

SEQ ID NO: 13085 - DNA, 19 bp, Artificial sequence
  Primer
ggactctgcagagtccgac

SEQ ID NO: 13086 - DNA, 19 bp, Artificial sequence
  Primer
ggactctgcagagtccacc

SEQ ID NO: 13087 - DNA, 19 bp, Artificial sequence
  Primer
tgactctgcagagtcagcc

SEQ ID NO: 13088 - DNA, 19 bp, Artificial sequence
  Primer
cgactctgcagagtcgggc

SEQ ID NO: 13089 - DNA, 19 bp, Artificial sequence
  Primer
cgactctgcagagtcgggt

SEQ ID NO: 13090 - DNA, 19 bp, Artificial sequence
  Primer
cgactctgcagagtcggtc

SEQ ID NO: 13091 - DNA, 19 bp, Artificial sequence
  Primer
cgactctgcagagtcgtgc

SEQ ID NO: 13092 - DNA, 19 bp, Artificial sequence
  Primer
agactctgcagagtctggc

SEQ ID NO: 13093 - DNA, 19 bp, Artificial sequence
  Primer
cgactctgcagagtcggga

SEQ ID NO: 13094 - DNA, 19 bp, Artificial sequence
  Primer
cgactctgcagagtcggac

SEQ ID NO: 13095 - DNA, 19 bp, Artificial sequence
  Primer
tgactctgcagagtcaggc

SEQ ID NO: 13096 - DNA, 19 bp, Artificial sequence
  Primer
cgactctgcagagtcgccc

SEQ ID NO: 13097 - DNA, 19 bp, Artificial sequence
  Primer
cgactctgcagagtcgcct

SEQ ID NO: 13098 - DNA, 19 bp, Artificial sequence
  Primer
cgactctgcagagtcgctc

SEQ ID NO: 13099 - DNA, 19 bp, Artificial sequence
  Primer
cgactctgcagagtcgtcc

SEQ ID NO: 13100 - DNA, 19 bp, Artificial sequence
  Primer
agactctgcagagtctccc

SEQ ID NO: 13101 - DNA, 19 bp, Artificial sequence
  Primer
cgactctgcagagtcgcca

SEQ ID NO: 13102 - DNA, 19 bp, Artificial sequence
  Primer
cgactctgcagagtcgcac

SEQ ID NO: 13103 - DNA, 19 bp, Artificial sequence
  Primer
tgactctgcagagtcaccc

SEQ ID NO: 13104 - DNA, 19 bp, Artificial sequence
  Primer
ggactctgcagagtcccgt

SEQ ID NO: 13105 - DNA, 19 bp, Artificial sequence
  Primer
ggactctgcagagtccctg

SEQ ID NO: 13106 - DNA, 19 bp, Artificial sequence
  Primer
ggactctgcagagtcctgg

SEQ ID NO: 13107 - DNA, 19 bp, Artificial sequence
  Primer
agactctgcagagtctcgg

SEQ ID NO: 13108 - DNA, 19 bp, Artificial sequence
  Primer
ggactctgcagagtcccga

SEQ ID NO: 13109 - DNA, 19 bp, Artificial sequence
  Primer
ggactctgcagagtcccag

SEQ ID NO: 13110 - DNA, 19 bp, Artificial sequence
  Primer
ggactctgcagagtccagg

SEQ ID NO: 13111 - DNA, 19 bp, Artificial sequence
  Primer
tgactctgcagagtcacgg

SEQ ID NO: 13112 - DNA, 19 bp, Artificial sequence
  Primer
cgactctgcagagtcgccg

SEQ ID NO: 13113 - DNA, 19 bp, Artificial sequence
  Primer
cgactctgcagagtcgctg

SEQ ID NO: 13114 - DNA, 19 bp, Artificial sequence
  Primer
cgactctgcagagtcgtcg

SEQ ID NO: 13115 - DNA, 19 bp, Artificial sequence
  Primer
agactctgcagagtctccg

SEQ ID NO: 13116 - DNA, 19 bp, Artificial sequence
  Primer
cgactctgcagagtcgcag

SEQ ID NO: 13117 - DNA, 19 bp, Artificial sequence
  Primer
tgactctgcagagtcaccg

SEQ ID NO: 13118 - DNA, 19 bp, Artificial sequence
  Primer
ggactctgcagagtccgtg

SEQ ID NO: 13119 - DNA, 19 bp, Artificial sequence
  Primer
agactctgcagagtctggg

SEQ ID NO: 13120 - DNA, 19 bp, Artificial sequence
  Primer
ggactctgcagagtccgag

SEQ ID NO: 13121 - DNA, 19 bp, Artificial sequence
  Primer
tgactctgcagagtcaggg

SEQ ID NO: 13122 - DNA, 19 bp, Artificial sequence
  Primer
cgactctgcagagtcgtgg

SEQ ID NO: 13123 - DNA, 19 bp, Artificial sequence
  Primer
cgactctgcagagtcggct

SEQ ID NO: 13124 - DNA, 19 bp, Artificial sequence
  Primer
cgactctgcagagtcggca

SEQ ID NO: 13125 - DNA, 19 bp, Artificial sequence
  Primer
agactctgcagagtctcgc

SEQ ID NO: 13126 - DNA, 19 bp, Artificial sequence
  Primer
tgactctgcagagtcacgc

SEQ ID NO: 13127 - DNA, 19 bp, Artificial sequence
  Primer
ggactctgcagagtcctgc

SEQ ID NO: 13128 - DNA, 19 bp, Artificial sequence
  Primer
ggactctgcagagtccagc

SEQ ID NO: 13129 - DNA, 19 bp, Artificial sequence
  Primer
ggactctgcagagtcctcg

SEQ ID NO: 13130 - DNA, 19 bp, Artificial sequence
  Primer
ggactctgcagagtccacg

SEQ ID NO: 13131 - DNA, 19 bp, Artificial sequence
  Primer
cgactctgcagagtcggtg

SEQ ID NO: 13132 - DNA, 19 bp, Artificial sequence
  Primer
cgactctgcagagtcggag

SEQ ID NO: 13133 - DNA, 19 bp, Artificial sequence
  Primer
ggactctgcagagtcccgc

SEQ ID NO: 13134 - DNA, 19 bp, Artificial sequence
  Primer
ggactctgcagagtccctc

SEQ ID NO: 13135 - DNA, 19 bp, Artificial sequence
  Primer
ggactctgcagagtcccac

SEQ ID NO: 13136 - DNA, 19 bp, Artificial sequence
  Primer
  misc_feature (1)..(1): n is a, c, g, or t
  misc_feature (16)..(19): n is a, c, g, or t
ngactcgcgcgagtcnnnn

SEQ ID NO: 13137 - DNA, 19 bp, Artificial sequence
  Primer
ggactcgcgcgagtccgcc

SEQ ID NO: 13138 - DNA, 19 bp, Artificial sequence
  Primer
ggactcgcgcgagtccgct

SEQ ID NO: 13139 - DNA, 19 bp, Artificial sequence
  Primer
ggactcgcgcgagtccgtc

SEQ ID NO: 13140 - DNA, 19 bp, Artificial sequence
  Primer
ggactcgcgcgagtcctcc

SEQ ID NO: 13141 - DNA, 19 bp, Artificial sequence
  Primer
agactcgcgcgagtctgcc

SEQ ID NO: 13142 - DNA, 19 bp, Artificial sequence
  Primer
ggactcgcgcgagtccgca

SEQ ID NO: 13143 - DNA, 19 bp, Artificial sequence
  Primer
ggactcgcgcgagtccgac

SEQ ID NO: 13144 - DNA, 19 bp, Artificial sequence
  Primer
ggactcgcgcgagtccacc

SEQ ID NO: 13145 - DNA, 19 bp, Artificial sequence
  Primer
tgactcgcgcgagtcagcc

SEQ ID NO: 13146 - DNA, 19 bp, Artificial sequence
  Primer
cgactcgcgcgagtcgggc

SEQ ID NO: 13147 - DNA, 19 bp, Artificial sequence
  Primer
cgactcgcgcgagtcgggt

SEQ ID NO: 13148 - DNA, 19 bp, Artificial sequence
  Primer
cgactcgcgcgagtcggtc

SEQ ID NO: 13149 - DNA, 19 bp, Artificial sequence
  Primer
cgactcgcgcgagtcgtgc

SEQ ID NO: 13150 - DNA, 19 bp, Artificial sequence
  Primer
agactcgcgcgagtctggc

SEQ ID NO: 13151 - DNA, 19 bp, Artificial sequence
  Primer
cgactcgcgcgagtcggga

SEQ ID NO: 13152 - DNA, 19 bp, Artificial sequence
  Primer
cgactcgcgcgagtcggac

SEQ ID NO: 13153 - DNA, 19 bp, Artificial sequence
  Primer
tgactcgcgcgagtcaggc

SEQ ID NO: 13154 - DNA, 19 bp, Artificial sequence
  Primer
cgactcgcgcgagtcgccc

SEQ ID NO: 13155 - DNA, 19 bp, Artificial sequence
  Primer
cgactcgcgcgagtcgcct

SEQ ID NO: 13156 - DNA, 19 bp, Artificial sequence
  Primer
cgactcgcgcgagtcgctc

SEQ ID NO: 13157 - DNA, 19 bp, Artificial sequence
  Primer
cgactcgcgcgagtcgtcc

SEQ ID NO: 13158 - DNA, 19 bp, Artificial sequence
  Primer
agactcgcgcgagtctccc

SEQ ID NO: 13159 - DNA, 19 bp, Artificial sequence
  Primer
cgactcgcgcgagtcgcca

SEQ ID NO: 13160 - DNA, 19 bp, Artificial sequence
  Primer
cgactcgcgcgagtcgcac

SEQ ID NO: 13161 - DNA, 19 bp, Artificial sequence
  Primer
tgactcgcgcgagtcaccc

SEQ ID NO: 13162 - DNA, 19 bp, Artificial sequence
  Primer
ggactcgcgcgagtcccgt

SEQ ID NO: 13163 - DNA, 19 bp, Artificial sequence
  Primer
ggactcgcgcgagtccctg

SEQ ID NO: 13164 - DNA, 19 bp, Artificial sequence
  Primer
ggactcgcgcgagtcctgg

SEQ ID NO: 13165 - DNA, 19 bp, Artificial sequence
  Primer
agactcgcgcgagtctcgg

SEQ ID NO: 13166 - DNA, 19 bp, Artificial sequence
  Primer
ggactcgcgcgagtcccga

SEQ ID NO: 13167 - DNA, 19 bp, Artificial sequence
  Primer
ggactcgcgcgagtcccag

SEQ ID NO: 13168 - DNA, 19 bp, Artificial sequence
  Primer
ggactcgcgcgagtccagg

SEQ ID NO: 13169 - DNA, 19 bp, Artificial sequence
  Primer
tgactcgcgcgagtcacgg

SEQ ID NO: 13170 - DNA, 19 bp, Artificial sequence
  Primer
cgactcgcgcgagtcgccg

SEQ ID NO: 13171 - DNA, 19 bp, Artificial sequence
  Primer
cgactcgcgcgagtcgctg

SEQ ID NO: 13172 - DNA, 19 bp, Artificial sequence
  Primer
cgactcgcgcgagtcgtcg

SEQ ID NO: 13173 - DNA, 19 bp, Artificial sequence
  Primer
agactcgcgcgagtctccg

SEQ ID NO: 13174 - DNA, 19 bp, Artificial sequence
  Primer
cgactcgcgcgagtcgcag

SEQ ID NO: 13175 - DNA, 19 bp, Artificial sequence
  Primer
tgactcgcgcgagtcaccg

SEQ ID NO: 13176 - DNA, 19 bp, Artificial sequence
  Primer
ggactcgcgcgagtccgtg

SEQ ID NO: 13177 - DNA, 19 bp, Artificial sequence
  Primer
agactcgcgcgagtctggg

SEQ ID NO: 13178 - DNA, 19 bp, Artificial sequence
  Primer
ggactcgcgcgagtccgag

SEQ ID NO: 13179 - DNA, 19 bp, Artificial sequence
  Primer
tgactcgcgcgagtcaggg

SEQ ID NO: 13180 - DNA, 19 bp, Artificial sequence
  Primer
cgactcgcgcgagtcgtgg

SEQ ID NO: 13181 - DNA, 19 bp, Artificial sequence
  Primer
cgactcgcgcgagtcggct

SEQ ID NO: 13182 - DNA, 19 bp, Artificial sequence
  Primer
cgactcgcgcgagtcggca

SEQ ID NO: 13183 - DNA, 19 bp, Artificial sequence
  Primer
agactcgcgcgagtctcgc

SEQ ID NO: 13184 - DNA, 19 bp, Artificial sequence
  Primer
tgactcgcgcgagtcacgc

SEQ ID NO: 13185 - DNA, 19 bp, Artificial sequence
  Primer
ggactcgcgcgagtcctgc

SEQ ID NO: 13186 - DNA, 19 bp, Artificial sequence
  Primer
ggactcgcgcgagtccagc

SEQ ID NO: 13187 - DNA, 19 bp, Artificial sequence
  Primer
ggactcgcgcgagtcctcg

SEQ ID NO: 13188 - DNA, 19 bp, Artificial sequence
  Primer
ggactcgcgcgagtccacg

SEQ ID NO: 13189 - DNA, 19 bp, Artificial sequence
  Primer
cgactcgcgcgagtcggtg

SEQ ID NO: 13190 - DNA, 19 bp, Artificial sequence
  Primer
cgactcgcgcgagtcggag

SEQ ID NO: 13191 - DNA, 19 bp, Artificial sequence
  Primer
ggactcgcgcgagtcccgc

SEQ ID NO: 13192 - DNA, 19 bp, Artificial sequence
  Primer
ggactcgcgcgagtccctc

SEQ ID NO: 13193 - DNA, 19 bp, Artificial sequence
  Primer
ggactcgcgcgagtcccac

SEQ ID NO: 13194 - DNA, 19 bp, Artificial sequence
  Primer
  misc_feature (1)..(1): n is a, c, g, or t
  misc_feature (16)..(19): n is a, c, g, or t
ngactcacgtgagtcnnnn

SEQ ID NO: 13195 - DNA, 19 bp, Artificial sequence
  Primer
ggactcacgtgagtccgcc

SEQ ID NO: 13196 - DNA, 19 bp, Artificial sequence
  Primer
ggactcacgtgagtccgct

SEQ ID NO: 13197 - DNA, 19 bp, Artificial sequence
  Primer
ggactcacgtgagtccgtc

SEQ ID NO: 13198 - DNA, 19 bp, Artificial sequence
  Primer
ggactcacgtgagtcctcc

SEQ ID NO: 13199 - DNA, 19 bp, Artificial sequence
  Primer
agactcacgtgagtctgcc

SEQ ID NO: 13200 - DNA, 19 bp, Artificial sequence
  Primer
ggactcacgtgagtccgca

SEQ ID NO: 13201 - DNA, 19 bp, Artificial sequence
  Primer
ggactcacgtgagtccgac

SEQ ID NO: 13202 - DNA, 19 bp, Artificial sequence
  Primer
ggactcacgtgagtccacc

SEQ ID NO: 13203 - DNA, 19 bp, Artificial sequence
  Primer
tgactcacgtgagtcagcc

SEQ ID NO: 13204 - DNA, 19 bp, Artificial sequence
  Primer
cgactcacgtgagtcgggc

SEQ ID NO: 13205 - DNA, 19 bp, Artificial sequence
  Primer
cgactcacgtgagtcgggt

SEQ ID NO: 13206 - DNA, 19 bp, Artificial sequence
  Primer
cgactcacgtgagtcggtc

SEQ ID NO: 13207 - DNA, 19 bp, Artificial sequence
  Primer
cgactcacgtgagtcgtgc

SEQ ID NO: 13208 - DNA, 19 bp, Artificial sequence
  Primer
agactcacgtgagtctggc

SEQ ID NO: 13209 - DNA, 19 bp, Artificial sequence
  Primer
cgactcacgtgagtcggga

SEQ ID NO: 13210 - DNA, 19 bp, Artificial sequence
  Primer
cgactcacgtgagtcggac

SEQ ID NO: 13211 - DNA, 19 bp, Artificial sequence
  Primer
tgactcacgtgagtcaggc

SEQ ID NO: 13212 - DNA, 19 bp, Artificial sequence
  Primer
cgactcacgtgagtcgccc

SEQ ID NO: 13213 - DNA, 19 bp, Artificial sequence
  Primer
cgactcacgtgagtcgcct

SEQ ID NO: 13214 - DNA, 19 bp, Artificial sequence
  Primer
cgactcacgtgagtcgctc

SEQ ID NO: 13215 - DNA, 19 bp, Artificial sequence
  Primer
cgactcacgtgagtcgtcc

SEQ ID NO: 13216 - DNA, 19 bp, Artificial sequence
  Primer
agactcacgtgagtctccc

SEQ ID NO: 13217 - DNA, 19 bp, Artificial sequence
  Primer
cgactcacgtgagtcgcca

SEQ ID NO: 13218 - DNA, 19 bp, Artificial sequence
  Primer
cgactcacgtgagtcgcac

SEQ ID NO: 13219 - DNA, 19 bp, Artificial sequence
  Primer
tgactcacgtgagtcaccc

SEQ ID NO: 13220 - DNA, 19 bp, Artificial sequence
  Primer
ggactcacgtgagtcccgt

SEQ ID NO: 13221 - DNA, 19 bp, Artificial sequence
  Primer
ggactcacgtgagtccctg

SEQ ID NO: 13222 - DNA, 19 bp, Artificial sequence
  Primer
ggactcacgtgagtcctgg

SEQ ID NO: 13223 - DNA, 19 bp, Artificial sequence
  Primer
agactcacgtgagtctcgg

SEQ ID NO: 13224 - DNA, 19 bp, Artificial sequence
  Primer
ggactcacgtgagtcccga

SEQ ID NO: 13225 - DNA, 19 bp, Artificial sequence
  Primer
ggactcacgtgagtcccag

SEQ ID NO: 13226 - DNA, 19 bp, Artificial sequence
  Primer
ggactcacgtgagtccagg

SEQ ID NO: 13227 - DNA, 19 bp, Artificial sequence
  Primer
tgactcacgtgagtcacgg

SEQ ID NO: 13228 - DNA, 19 bp, Artificial sequence
  Primer
cgactcacgtgagtcgccg

SEQ ID NO: 13229 - DNA, 19 bp, Artificial sequence
  Primer
cgactcacgtgagtcgctg

SEQ ID NO: 13230 - DNA, 19 bp, Artificial sequence
  Primer
cgactcacgtgagtcgtcg

SEQ ID NO: 13231 - DNA, 19 bp, Artificial sequence
  Primer
agactcacgtgagtctccg

SEQ ID NO: 13232 - DNA, 19 bp, Artificial sequence
  Primer
cgactcacgtgagtcgcag

SEQ ID NO: 13233 - DNA, 19 bp, Artificial sequence
  Primer
tgactcacgtgagtcaccg

SEQ ID NO: 13234 - DNA, 19 bp, Artificial sequence
  Primer
ggactcacgtgagtccgtg

SEQ ID NO: 13235 - DNA, 19 bp, Artificial sequence
  Primer
agactcacgtgagtctggg

SEQ ID NO: 13236 - DNA, 19 bp, Artificial sequence
  Primer
ggactcacgtgagtccgag

SEQ ID NO: 13237 - DNA, 19 bp, Artificial sequence
  Primer
tgactcacgtgagtcaggg

SEQ ID NO: 13238 - DNA, 19 bp, Artificial sequence
  Primer
cgactcacgtgagtcgtgg

SEQ ID NO: 13239 - DNA, 19 bp, Artificial sequence
  Primer
cgactcacgtgagtcggct

SEQ ID NO: 13240 - DNA, 19 bp, Artificial sequence
  Primer
cgactcacgtgagtcggca

SEQ ID NO: 13241 - DNA, 19 bp, Artificial sequence
  Primer
agactcacgtgagtctcgc

SEQ ID NO: 13242 - DNA, 19 bp, Artificial sequence
  Primer
tgactcacgtgagtcacgc

SEQ ID NO: 13243 - DNA, 19 bp, Artificial sequence
  Primer
ggactcacgtgagtcctgc

SEQ ID NO: 13244 - DNA, 19 bp, Artificial sequence
  Primer
ggactcacgtgagtccagc

SEQ ID NO: 13245 - DNA, 19 bp, Artificial sequence
  Primer
ggactcacgtgagtcctcg

SEQ ID NO: 13246 - DNA, 19 bp, Artificial sequence
  Primer
ggactcacgtgagtccacg

SEQ ID NO: 13247 - DNA, 19 bp, Artificial sequence
  Primer
cgactcacgtgagtcggtg

SEQ ID NO: 13248 - DNA, 19 bp, Artificial sequence
  Primer
cgactcacgtgagtcggag

SEQ ID NO: 13249 - DNA, 19 bp, Artificial sequence
  Primer
ggactcacgtgagtcccgc

SEQ ID NO: 13250 - DNA, 19 bp, Artificial sequence
  Primer
ggactcacgtgagtccctc

SEQ ID NO: 13251 - DNA, 19 bp, Artificial sequence
  Primer
ggactcacgtgagtcccac

SEQ ID NO: 13252 - DNA, 19 bp, Artificial sequence
  Primer
  misc_feature (1)..(1): n is a, c, g, or t
  misc_feature (16)..(19): n is a, c, g, or t
ngactcggccgagtcnnnn

SEQ ID NO: 13253 - DNA, 19 bp, Artificial sequence
  Primer
ggactcggccgagtccgcc

SEQ ID NO: 13254 - DNA, 19 bp, Artificial sequence
  Primer
ggactcggccgagtccgct

SEQ ID NO: 13255 - DNA, 19 bp, Artificial sequence
  Primer
ggactcggccgagtccgtc

SEQ ID NO: 13256 - DNA, 19 bp, Artificial sequence
  Primer
ggactcggccgagtcctcc

SEQ ID NO: 13257 - DNA, 19 bp, Artificial sequence
  Primer
agactcggccgagtctgcc

SEQ ID NO: 13258 - DNA, 19 bp, Artificial sequence
  Primer
ggactcggccgagtccgca

SEQ ID NO: 13259 - DNA, 19 bp, Artificial sequence
  Primer
ggactcggccgagtccgac

SEQ ID NO: 13260 - DNA, 19 bp, Artificial sequence
  Primer
ggactcggccgagtccacc

SEQ ID NO: 13261 - DNA, 19 bp, Artificial sequence
  Primer
tgactcggccgagtcagcc

SEQ ID NO: 13262 - DNA, 19 bp, Artificial sequence
  Primer
cgactcggccgagtcgggc

SEQ ID NO: 13263 - DNA, 19 bp, Artificial sequence
  Primer
cgactcggccgagtcgggt

SEQ ID NO: 13264 - DNA, 19 bp, Artificial sequence
  Primer
cgactcggccgagtcggtc

SEQ ID NO: 13265 - DNA, 19 bp, Artificial sequence
  Primer
cgactcggccgagtcgtgc

SEQ ID NO: 13266 - DNA, 19 bp, Artificial sequence
  Primer
agactcggccgagtctggc

SEQ ID NO: 13267 - DNA, 19 bp, Artificial sequence
  Primer
cgactcggccgagtcggga

SEQ ID NO: 13268 - DNA, 19 bp, Artificial sequence
  Primer
cgactcggccgagtcggac

SEQ ID NO: 13269 - DNA, 19 bp, Artificial sequence
  Primer
tgactcggccgagtcaggc

SEQ ID NO: 13270 - DNA, 19 bp, Artificial sequence
  Primer
cgactcggccgagtcgccc

SEQ ID NO: 13271 - DNA, 19 bp, Artificial sequence
  Primer
cgactcggccgagtcgcct

SEQ ID NO: 13272 - DNA, 19 bp, Artificial sequence
  Primer
cgactcggccgagtcgctc

SEQ ID NO: 13273 - DNA, 19 bp, Artificial sequence
  Primer
cgactcggccgagtcgtcc

SEQ ID NO: 13274 - DNA, 19 bp, Artificial sequence
  Primer
agactcggccgagtctccc

SEQ ID NO: 13275 - DNA, 19 bp, Artificial sequence
  Primer
cgactcggccgagtcgcca

SEQ ID NO: 13276 - DNA, 19 bp, Artificial sequence
  Primer
cgactcggccgagtcgcac

SEQ ID NO: 13277 - DNA, 19 bp, Artificial sequence
  Primer
tgactcggccgagtcaccc

SEQ ID NO: 13278 - DNA, 19 bp, Artificial sequence
  Primer
ggactcggccgagtcccgt

SEQ ID NO: 13279 - DNA, 19 bp, Artificial sequence
  Primer
ggactcggccgagtccctg

SEQ ID NO: 13280 - DNA, 19 bp, Artificial sequence
  Primer
ggactcggccgagtcctgg

SEQ ID NO: 13281 - DNA, 19 bp, Artificial sequence
  Primer
agactcggccgagtctcgg

SEQ ID NO: 13282 - DNA, 19 bp, Artificial sequence
  Primer
ggactcggccgagtcccga

SEQ ID NO: 13283 - DNA, 19 bp, Artificial sequence
  Primer
ggactcggccgagtcccag

SEQ ID NO: 13284 - DNA, 19 bp, Artificial sequence
  Primer
ggactcggccgagtccagg

SEQ ID NO: 13285 - DNA, 19 bp, Artificial sequence
  Primer
tgactcggccgagtcacgg

SEQ ID NO: 13286 - DNA, 19 bp, Artificial sequence
  Primer
cgactcggccgagtcgccg

SEQ ID NO: 13287 - DNA, 19 bp, Artificial sequence
  Primer
cgactcggccgagtcgctg

SEQ ID NO: 13288 - DNA, 19 bp, Artificial sequence
  Primer
cgactcggccgagtcgtcg

SEQ ID NO: 13289 - DNA, 19 bp, Artificial sequence
  Primer
agactcggccgagtctccg

SEQ ID NO: 13290 - DNA, 19 bp, Artificial sequence
  Primer
cgactcggccgagtcgcag

SEQ ID NO: 13291 - DNA, 19 bp, Artificial sequence
  Primer
tgactcggccgagtcaccg

SEQ ID NO: 13292 - DNA, 19 bp, Artificial sequence
  Primer
ggactcggccgagtccgtg

SEQ ID NO: 13293 - DNA, 19 bp, Artificial sequence
  Primer
agactcggccgagtctggg

SEQ ID NO: 13294 - DNA, 19 bp, Artificial sequence
  Primer
ggactcggccgagtccgag

SEQ ID NO: 13295 - DNA, 19 bp, Artificial sequence
  Primer
tgactcggccgagtcaggg

SEQ ID NO: 13296 - DNA, 19 bp, Artificial sequence
  Primer
cgactcggccgagtcgtgg

SEQ ID NO: 13297 - DNA, 19 bp, Artificial sequence
  Primer
cgactcggccgagtcggct

SEQ ID NO: 13298 - DNA, 19 bp, Artificial sequence
  Primer
cgactcggccgagtcggca

SEQ ID NO: 13299 - DNA, 19 bp, Artificial sequence
  Primer
agactcggccgagtctcgc

SEQ ID NO: 13300 - DNA, 19 bp, Artificial sequence
  Primer
tgactcggccgagtcacgc

SEQ ID NO: 13301 - DNA, 19 bp, Artificial sequence
  Primer
ggactcggccgagtcctgc

SEQ ID NO: 13302 - DNA, 19 bp, Artificial sequence
  Primer
ggactcggccgagtccagc

SEQ ID NO: 13303 - DNA, 19 bp, Artificial sequence
  Primer
ggactcggccgagtcctcg

SEQ ID NO: 13304 - DNA, 19 bp, Artificial sequence
  Primer
ggactcggccgagtccacg

SEQ ID NO: 13305 - DNA, 19 bp, Artificial sequence
  Primer
cgactcggccgagtcggtg

SEQ ID NO: 13306 - DNA, 19 bp, Artificial sequence
  Primer
cgactcggccgagtcggag

SEQ ID NO: 13307 - DNA, 19 bp, Artificial sequence
  Primer
ggactcggccgagtcccgc

SEQ ID NO: 13308 - DNA, 19 bp, Artificial sequence
  Primer
ggactcggccgagtccctc

SEQ ID NO: 13309 - DNA, 19 bp, Artificial sequence
  Primer
ggactcggccgagtcccac

SEQ ID NO: 13310 - DNA, 19 bp, Artificial sequence
  Primer
  misc_feature (1)..(1): n is a, c, g, or t
  misc_feature (16)..(19): n is a, c, g, or t
ngactcccgggagtcnnnn

SEQ ID NO: 13311 - DNA, 19 bp, Artificial sequence
  Primer
ggactcccgggagtccgcc

SEQ ID NO: 13312 - DNA, 19 bp, Artificial sequence
  Primer
ggactcccgggagtccgct

SEQ ID NO: 13313 - DNA, 19 bp, Artificial sequence
  Primer
ggactcccgggagtccgtc

SEQ ID NO: 13314 - DNA, 19 bp, Artificial sequence
  Primer
ggactcccgggagtcctcc

SEQ ID NO: 13315 - DNA, 19 bp, Artificial sequence
  Primer
agactcccgggagtctgcc

SEQ ID NO: 13316 - DNA, 19 bp, Artificial sequence
  Primer
ggactcccgggagtccgca

SEQ ID NO: 13317 - DNA, 19 bp, Artificial sequence
  Primer
ggactcccgggagtccgac

SEQ ID NO: 13318 - DNA, 19 bp, Artificial sequence
  Primer
ggactcccgggagtccacc

SEQ ID NO: 13319 - DNA, 19 bp, Artificial sequence
  Primer
tgactcccgggagtcagcc

SEQ ID NO: 13320 - DNA, 19 bp, Artificial sequence
  Primer
cgactcccgggagtcgggc

SEQ ID NO: 13321 - DNA, 19 bp, Artificial sequence
  Primer
cgactcccgggagtcgggt

SEQ ID NO: 13322 - DNA, 19 bp, Artificial sequence
  Primer
cgactcccgggagtcggtc

SEQ ID NO: 13323 - DNA, 19 bp, Artificial sequence
  Primer
cgactcccgggagtcgtgc

SEQ ID NO: 13324 - DNA, 19 bp, Artificial sequence
  Primer
agactcccgggagtctggc

SEQ ID NO: 13325 - DNA, 19 bp, Artificial sequence
  Primer
cgactcccgggagtcggga

SEQ ID NO: 13326 - DNA, 19 bp, Artificial sequence
  Primer
cgactcccgggagtcggac

SEQ ID NO: 13327 - DNA, 19 bp, Artificial sequence
  Primer
tgactcccgggagtcaggc

SEQ ID NO: 13328 - DNA, 19 bp, Artificial sequence
  Primer
cgactcccgggagtcgccc

SEQ ID NO: 13329 - DNA, 19 bp, Artificial sequence
  Primer
cgactcccgggagtcgcct

SEQ ID NO: 13330 - DNA, 19 bp, Artificial sequence
  Primer
cgactcccgggagtcgctc

SEQ ID NO: 13331 - DNA, 19 bp, Artificial sequence
  Primer
cgactcccgggagtcgtcc

SEQ ID NO: 13332 - DNA, 19 bp, Artificial sequence
  Primer
agactcccgggagtctccc

SEQ ID NO: 13333 - DNA, 19 bp, Artificial sequence
  Primer
cgactcccgggagtcgcca

SEQ ID NO: 13334 - DNA, 19 bp, Artificial sequence
  Primer
cgactcccgggagtcgcac

SEQ ID NO: 13335 - DNA, 19 bp, Artificial sequence
  Primer
tgactcccgggagtcaccc

SEQ ID NO: 13336 - DNA, 19 bp, Artificial sequence
  Primer
ggactcccgggagtcccgt

SEQ ID NO: 13337 - DNA, 19 bp, Artificial sequence
  Primer
ggactcccgggagtccctg

SEQ ID NO: 13338 - DNA, 19 bp, Artificial sequence
  Primer
ggactcccgggagtcctgg

SEQ ID NO: 13339 - DNA, 19 bp, Artificial sequence
  Primer
agactcccgggagtctcgg

SEQ ID NO: 13340 - DNA, 19 bp, Artificial sequence
  Primer
ggactcccgggagtcccga

SEQ ID NO: 13341 - DNA, 19 bp, Artificial sequence
  Primer
ggactcccgggagtcccag

SEQ ID NO: 13342 - DNA, 19 bp, Artificial sequence
  Primer
ggactcccgggagtccagg

SEQ ID NO: 13343 - DNA, 19 bp, Artificial sequence
  Primer
tgactcccgggagtcacgg

SEQ ID NO: 13344 - DNA, 19 bp, Artificial sequence
  Primer
cgactcccgggagtcgccg

SEQ ID NO: 13345 - DNA, 19 bp, Artificial sequence
  Primer
cgactcccgggagtcgctg

SEQ ID NO: 13346 - DNA, 19 bp, Artificial sequence
  Primer
cgactcccgggagtcgtcg

SEQ ID NO: 13347 - DNA, 19 bp, Artificial sequence
  Primer
agactcccgggagtctccg

SEQ ID NO: 13348 - DNA, 19 bp, Artificial sequence
  Primer
cgactcccgggagtcgcag

SEQ ID NO: 13349 - DNA, 19 bp, Artificial sequence
  Primer
tgactcccgggagtcaccg

SEQ ID NO: 13350 - DNA, 19 bp, Artificial sequence
  Primer
ggactcccgggagtccgtg

SEQ ID NO: 13351 - DNA, 19 bp, Artificial sequence
  Primer
agactcccgggagtctggg

SEQ ID NO: 13352 - DNA, 19 bp, Artificial sequence
  Primer
ggactcccgggagtccgag

SEQ ID NO: 13353 - DNA, 19 bp, Artificial sequence
  Primer
tgactcccgggagtcaggg

SEQ ID NO: 13354 - DNA, 19 bp, Artificial sequence
  Primer
cgactcccgggagtcgtgg

SEQ ID NO: 13355 - DNA, 19 bp, Artificial sequence
  Primer
cgactcccgggagtcggct

SEQ ID NO: 13356 - DNA, 19 bp, Artificial sequence
  Primer
cgactcccgggagtcggca

SEQ ID NO: 13357 - DNA, 19 bp, Artificial sequence
  Primer
agactcccgggagtctcgc

SEQ ID NO: 13358 - DNA, 19 bp, Artificial sequence
  Primer
tgactcccgggagtcacgc

SEQ ID NO: 13359 - DNA, 19 bp, Artificial sequence
  Primer
ggactcccgggagtcctgc

SEQ ID NO: 13360 - DNA, 19 bp, Artificial sequence
  Primer
ggactcccgggagtccagc

SEQ ID NO: 13361 - DNA, 19 bp, Artificial sequence
  Primer
ggactcccgggagtcctcg

SEQ ID NO: 13362 - DNA, 19 bp, Artificial sequence
  Primer
ggactcccgggagtccacg

SEQ ID NO: 13363 - DNA, 19 bp, Artificial sequence
  Primer
cgactcccgggagtcggtg

SEQ ID NO: 13364 - DNA, 19 bp, Artificial sequence
  Primer
cgactcccgggagtcggag

SEQ ID NO: 13365 - DNA, 19 bp, Artificial sequence
  Primer
ggactcccgggagtcccgc

SEQ ID NO: 13366 - DNA, 19 bp, Artificial sequence
  Primer
ggactcccgggagtccctc

SEQ ID NO: 13367 - DNA, 19 bp, Artificial sequence
  Primer
ggactcccgggagtcccac

SEQ ID NO: 13368 - DNA, 19 bp, Artificial sequence
  Primer
  misc_feature (1)..(1): n is a, c, g, or t
  misc_feature (16)..(19): n is a, c, g, or t
ngactcgtacgagtcnnnn

SEQ ID NO: 13369 - DNA, 19 bp, Artificial sequence
  Primer
ggactcgtacgagtccgcc

SEQ ID NO: 13370 - DNA, 19 bp, Artificial sequence
  Primer
ggactcgtacgagtccgct

SEQ ID NO: 13371 - DNA, 19 bp, Artificial sequence
  Primer
ggactcgtacgagtccgtc

SEQ ID NO: 13372 - DNA, 19 bp, Artificial sequence
  Primer
ggactcgtacgagtcctcc

SEQ ID NO: 13373 - DNA, 19 bp, Artificial sequence
  Primer
agactcgtacgagtctgcc

SEQ ID NO: 13374 - DNA, 19 bp, Artificial sequence
  Primer
ggactcgtacgagtccgca

SEQ ID NO: 13375 - DNA, 19 bp, Artificial sequence
  Primer
ggactcgtacgagtccgac

SEQ ID NO: 13376 - DNA, 19 bp, Artificial sequence
  Primer
ggactcgtacgagtccacc

SEQ ID NO: 13377 - DNA, 19 bp, Artificial sequence
  Primer
tgactcgtacgagtcagcc

SEQ ID NO: 13378 - DNA, 19 bp, Artificial sequence
  Primer
cgactcgtacgagtcgggc

SEQ ID NO: 13379 - DNA, 19 bp, Artificial sequence
  Primer
cgactcgtacgagtcgggt

SEQ ID NO: 13380 - DNA, 19 bp, Artificial sequence
  Primer
cgactcgtacgagtcggtc

SEQ ID NO: 13381 - DNA, 19 bp, Artificial sequence
  Primer
cgactcgtacgagtcgtgc

SEQ ID NO: 13382 - DNA, 19 bp, Artificial sequence
  Primer
agactcgtacgagtctggc

SEQ ID NO: 13383 - DNA, 19 bp, Artificial sequence
  Primer
cgactcgtacgagtcggga

SEQ ID NO: 13384 - DNA, 19 bp, Artificial sequence
  Primer
cgactcgtacgagtcggac

SEQ ID NO: 13385 - DNA, 19 bp, Artificial sequence
  Primer
tgactcgtacgagtcaggc

SEQ ID NO: 13386 - DNA, 19 bp, Artificial sequence
  Primer
cgactcgtacgagtcgccc

SEQ ID NO: 13387 - DNA, 19 bp, Artificial sequence
  Primer
cgactcgtacgagtcgcct

SEQ ID NO: 13388 - DNA, 19 bp, Artificial sequence
  Primer
cgactcgtacgagtcgctc

SEQ ID NO: 13389 - DNA, 19 bp, Artificial sequence
  Primer
cgactcgtacgagtcgtcc

SEQ ID NO: 13390 - DNA, 19 bp, Artificial sequence
  Primer
agactcgtacgagtctccc

SEQ ID NO: 13391 - DNA, 19 bp, Artificial sequence
  Primer
cgactcgtacgagtcgcca

SEQ ID NO: 13392 - DNA, 19 bp, Artificial sequence
  Primer
cgactcgtacgagtcgcac

SEQ ID NO: 13393 - DNA, 19 bp, Artificial sequence
  Primer
tgactcgtacgagtcaccc

SEQ ID NO: 13394 - DNA, 19 bp, Artificial sequence
  Primer
ggactcgtacgagtcccgt

SEQ ID NO: 13395 - DNA, 19 bp, Artificial sequence
  Primer
ggactcgtacgagtccctg

SEQ ID NO: 13396 - DNA, 19 bp, Artificial sequence
  Primer
ggactcgtacgagtcctgg

SEQ ID NO: 13397 - DNA, 19 bp, Artificial sequence
  Primer
agactcgtacgagtctcgg

SEQ ID NO: 13398 - DNA, 19 bp, Artificial sequence
  Primer
ggactcgtacgagtcccga

SEQ ID NO: 13399 - DNA, 19 bp, Artificial sequence
  Primer
ggactcgtacgagtcccag

SEQ ID NO: 13400 - DNA, 19 bp, Artificial sequence
  Primer
ggactcgtacgagtccagg

SEQ ID NO: 13401 - DNA, 19 bp, Artificial sequence
  Primer
tgactcgtacgagtcacgg

SEQ ID NO: 13402 - DNA, 19 bp, Artificial sequence
  Primer
cgactcgtacgagtcgccg

SEQ ID NO: 13403 - DNA, 19 bp, Artificial sequence
  Primer
cgactcgtacgagtcgctg

SEQ ID NO: 13404 - DNA, 19 bp, Artificial sequence
  Primer
cgactcgtacgagtcgtcg

SEQ ID NO: 13405 - DNA, 19 bp, Artificial sequence
  Primer
agactcgtacgagtctccg

SEQ ID NO: 13406 - DNA, 19 bp, Artificial sequence
  Primer
cgactcgtacgagtcgcag

SEQ ID NO: 13407 - DNA, 19 bp, Artificial sequence
  Primer
tgactcgtacgagtcaccg

SEQ ID NO: 13408 - DNA, 19 bp, Artificial sequence
  Primer
ggactcgtacgagtccgtg

SEQ ID NO: 13409 - DNA, 19 bp, Artificial sequence
  Primer
agactcgtacgagtctggg

SEQ ID NO: 13410 - DNA, 19 bp, Artificial sequence
  Primer
ggactcgtacgagtccgag

SEQ ID NO: 13411 - DNA, 19 bp, Artificial sequence
  Primer
tgactcgtacgagtcaggg

SEQ ID NO: 13412 - DNA, 19 bp, Artificial sequence
  Primer
cgactcgtacgagtcgtgg

SEQ ID NO: 13413 - DNA, 19 bp, Artificial sequence
  Primer
cgactcgtacgagtcggct

SEQ ID NO: 13414 - DNA, 19 bp, Artificial sequence
  Primer
cgactcgtacgagtcggca

SEQ ID NO: 13415 - DNA, 19 bp, Artificial sequence
  Primer
agactcgtacgagtctcgc

SEQ ID NO: 13416 - DNA, 19 bp, Artificial sequence
  Primer
tgactcgtacgagtcacgc

SEQ ID NO: 13417 - DNA, 19 bp, Artificial sequence
  Primer
ggactcgtacgagtcctgc

SEQ ID NO: 13418 - DNA, 19 bp, Artificial sequence
  Primer
ggactcgtacgagtccagc

SEQ ID NO: 13419 - DNA, 19 bp, Artificial sequence
  Primer
ggactcgtacgagtcctcg

SEQ ID NO: 13420 - DNA, 19 bp, Artificial sequence
  Primer
ggactcgtacgagtccacg

SEQ ID NO: 13421 - DNA, 19 bp, Artificial sequence
  Primer
cgactcgtacgagtcggtg

SEQ ID NO: 13422 - DNA, 19 bp, Artificial sequence
  Primer
cgactcgtacgagtcggag

SEQ ID NO: 13423 - DNA, 19 bp, Artificial sequence
  Primer
ggactcgtacgagtcccgc

SEQ ID NO: 13424 - DNA, 19 bp, Artificial sequence
  Primer
ggactcgtacgagtccctc

SEQ ID NO: 13425 - DNA, 19 bp, Artificial sequence
  Primer
ggactcgtacgagtcccac

SEQ ID NO: 13426 - DNA, 19 bp, Artificial sequence
  Primer
  misc_feature (1)..(1): n is a, c, g, or t
  misc_feature (16)..(19): n is a, c, g, or t
ngactcctaggagtcnnnn

SEQ ID NO: 13427 - DNA, 19 bp, Artificial sequence
  Primer
ggactcctaggagtccgcc

SEQ ID NO: 13428 - DNA, 19 bp, Artificial sequence
  Primer
ggactcctaggagtccgct

SEQ ID NO: 13429 - DNA, 19 bp, Artificial sequence
  Primer
ggactcctaggagtccgtc

SEQ ID NO: 13430 - DNA, 19 bp, Artificial sequence
  Primer
ggactcctaggagtcctcc

SEQ ID NO: 13431 - DNA, 19 bp, Artificial sequence
  Primer
agactcctaggagtctgcc

SEQ ID NO: 13432 - DNA, 19 bp, Artificial sequence
  Primer
ggactcctaggagtccgca

SEQ ID NO: 13433 - DNA, 19 bp, Artificial sequence
  Primer
ggactcctaggagtccgac

SEQ ID NO: 13434 - DNA, 19 bp, Artificial sequence
  Primer
ggactcctaggagtccacc

SEQ ID NO: 13435 - DNA, 19 bp, Artificial sequence
  Primer
tgactcctaggagtcagcc

SEQ ID NO: 13436 - DNA, 19 bp, Artificial sequence
  Primer
cgactcctaggagtcgggc

SEQ ID NO: 13437 - DNA, 19 bp, Artificial sequence
  Primer
cgactcctaggagtcgggt

SEQ ID NO: 13438 - DNA, 19 bp, Artificial sequence
  Primer
cgactcctaggagtcggtc

SEQ ID NO: 13439 - DNA, 19 bp, Artificial sequence
  Primer
cgactcctaggagtcgtgc

SEQ ID NO: 13440 - DNA, 19 bp, Artificial sequence
  Primer
agactcctaggagtctggc

SEQ ID NO: 13441 - DNA, 19 bp, Artificial sequence
  Primer
cgactcctaggagtcggga

SEQ ID NO: 13442 - DNA, 19 bp, Artificial sequence
  Primer
cgactcctaggagtcggac

SEQ ID NO: 13443 - DNA, 19 bp, Artificial sequence
  Primer
tgactcctaggagtcaggc

SEQ ID NO: 13444 - DNA, 19 bp, Artificial sequence
  Primer
cgactcctaggagtcgccc

SEQ ID NO: 13445 - DNA, 19 bp, Artificial sequence
  Primer
cgactcctaggagtcgcct

SEQ ID NO: 13446 - DNA, 19 bp, Artificial sequence
  Primer
cgactcctaggagtcgctc

SEQ ID NO: 13447 - DNA, 19 bp, Artificial sequence
  Primer
cgactcctaggagtcgtcc

SEQ ID NO: 13448 - DNA, 19 bp, Artificial sequence
  Primer
agactcctaggagtctccc

SEQ ID NO: 13449 - DNA, 19 bp, Artificial sequence
  Primer
cgactcctaggagtcgcca

SEQ ID NO: 13450 - DNA, 19 bp, Artificial sequence
  Primer
cgactcctaggagtcgcac

SEQ ID NO: 13451 - DNA, 19 bp, Artificial sequence
  Primer
tgactcctaggagtcaccc

SEQ ID NO: 13452 - DNA, 19 bp, Artificial sequence
  Primer
ggactcctaggagtcccgt

SEQ ID NO: 13453 - DNA, 19 bp, Artificial sequence
  Primer
ggactcctaggagtccctg

SEQ ID NO: 13454 - DNA, 19 bp, Artificial sequence
  Primer
ggactcctaggagtcctgg

SEQ ID NO: 13455 - DNA, 19 bp, Artificial sequence
  Primer
agactcctaggagtctcgg

SEQ ID NO: 13456 - DNA, 19 bp, Artificial sequence
  Primer
ggactcctaggagtcccga

SEQ ID NO: 13457 - DNA, 19 bp, Artificial sequence
  Primer
ggactcctaggagtcccag

SEQ ID NO: 13458 - DNA, 19 bp, Artificial sequence
  Primer
ggactcctaggagtccagg

SEQ ID NO: 13459 - DNA, 19 bp, Artificial sequence
  Primer
tgactcctaggagtcacgg

SEQ ID NO: 13460 - DNA, 19 bp, Artificial sequence
  Primer
cgactcctaggagtcgccg

SEQ ID NO: 13461 - DNA, 19 bp, Artificial sequence
  Primer
cgactcctaggagtcgctg

SEQ ID NO: 13462 - DNA, 19 bp, Artificial sequence
  Primer
cgactcctaggagtcgtcg

SEQ ID NO: 13463 - DNA, 19 bp, Artificial sequence
  Primer
agactcctaggagtctccg

SEQ ID NO: 13464 - DNA, 19 bp, Artificial sequence
  Primer
cgactcctaggagtcgcag

SEQ ID NO: 13465 - DNA, 19 bp, Artificial sequence
  Primer
tgactcctaggagtcaccg

SEQ ID NO: 13466 - DNA, 19 bp, Artificial sequence
  Primer
ggactcctaggagtccgtg

SEQ ID NO: 13467 - DNA, 19 bp, Artificial sequence
  Primer
agactcctaggagtctggg

SEQ ID NO: 13468 - DNA, 19 bp, Artificial sequence
  Primer
ggactcctaggagtccgag

SEQ ID NO: 13469 - DNA, 19 bp, Artificial sequence
  Primer
tgactcctaggagtcaggg

SEQ ID NO: 13470 - DNA, 19 bp, Artificial sequence
  Primer
cgactcctaggagtcgtgg

SEQ ID NO: 13471 - DNA, 19 bp, Artificial sequence
  Primer
cgactcctaggagtcggct

SEQ ID NO: 13472 - DNA, 19 bp, Artificial sequence
  Primer
cgactcctaggagtcggca

SEQ ID NO: 13473 - DNA, 19 bp, Artificial sequence
  Primer
agactcctaggagtctcgc

SEQ ID NO: 13474 - DNA, 19 bp, Artificial sequence
  Primer
tgactcctaggagtcacgc

SEQ ID NO: 13475 - DNA, 19 bp, Artificial sequence
  Primer
ggactcctaggagtcctgc

SEQ ID NO: 13476 - DNA, 19 bp, Artificial sequence
  Primer
ggactcctaggagtccagc

SEQ ID NO: 13477 - DNA, 19 bp, Artificial sequence
  Primer
ggactcctaggagtcctcg

SEQ ID NO: 13478 - DNA, 19 bp, Artificial sequence
  Primer
ggactcctaggagtccacg

SEQ ID NO: 13479 - DNA, 19 bp, Artificial sequence
  Primer
cgactcctaggagtcggtg

SEQ ID NO: 13480 - DNA, 19 bp, Artificial sequence
  Primer
cgactcctaggagtcggag

SEQ ID NO: 13481 - DNA, 19 bp, Artificial sequence
  Primer
ggactcctaggagtcccgc

SEQ ID NO: 13482 - DNA, 19 bp, Artificial sequence
  Primer
ggactcctaggagtccctc

SEQ ID NO: 13483 - DNA, 19 bp, Artificial sequence
  Primer
ggactcctaggagtcccac

SEQ ID NO: 13484 - DNA, 19 bp, Artificial sequence
  Primer
  misc_feature (1)..(1): n is a, c, g, or t
  misc_feature (16)..(19): n is a, c, g, or t
ngactccatggagtcnnnn

SEQ ID NO: 13485 - DNA, 19 bp, Artificial sequence
  Primer
ggactccatggagtccgcc

SEQ ID NO: 13486 - DNA, 19 bp, Artificial sequence
  Primer
ggactccatggagtccgct

SEQ ID NO: 13487 - DNA, 19 bp, Artificial sequence
  Primer
ggactccatggagtccgtc

SEQ ID NO: 13488 - DNA, 19 bp, Artificial sequence
  Primer
ggactccatggagtcctcc

SEQ ID NO: 13489 - DNA, 19 bp, Artificial sequence
  Primer
agactccatggagtctgcc

SEQ ID NO: 13490 - DNA, 19 bp, Artificial sequence
  Primer
ggactccatggagtccgca

SEQ ID NO: 13491 - DNA, 19 bp, Artificial sequence
  Primer
ggactccatggagtccgac

SEQ ID NO: 13492 - DNA, 19 bp, Artificial sequence
  Primer
ggactccatggagtccacc

SEQ ID NO: 13493 - DNA, 19 bp, Artificial sequence
  Primer
tgactccatggagtcagcc

SEQ ID NO: 13494 - DNA, 19 bp, Artificial sequence
  Primer
cgactccatggagtcgggc

SEQ ID NO: 13495 - DNA, 19 bp, Artificial sequence
  Primer
cgactccatggagtcgggt

SEQ ID NO: 13496 - DNA, 19 bp, Artificial sequence
  Primer
cgactccatggagtcggtc

SEQ ID NO: 13497 - DNA, 19 bp, Artificial sequence
  Primer
cgactccatggagtcgtgc

SEQ ID NO: 13498 - DNA, 19 bp, Artificial sequence
  Primer
agactccatggagtctggc

SEQ ID NO: 13499 - DNA, 19 bp, Artificial sequence
  Primer
cgactccatggagtcggga

SEQ ID NO: 13500 - DNA, 19 bp, Artificial sequence
  Primer
cgactccatggagtcggac

SEQ ID NO: 13501 - DNA, 19 bp, Artificial sequence
  Primer
tgactccatggagtcaggc

SEQ ID NO: 13502 - DNA, 19 bp, Artificial sequence
  Primer
cgactccatggagtcgccc

SEQ ID NO: 13503 - DNA, 19 bp, Artificial sequence
  Primer
cgactccatggagtcgcct

SEQ ID NO: 13504 - DNA, 19 bp, Artificial sequence
  Primer
cgactccatggagtcgctc

SEQ ID NO: 13505 - DNA, 19 bp, Artificial sequence
  Primer
cgactccatggagtcgtcc

SEQ ID NO: 13506 - DNA, 19 bp, Artificial sequence
  Primer
agactccatggagtctccc

SEQ ID NO: 13507 - DNA, 19 bp, Artificial sequence
  Primer
cgactccatggagtcgcca

SEQ ID NO: 13508 - DNA, 19 bp, Artificial sequence
  Primer
cgactccatggagtcgcac

SEQ ID NO: 13509 - DNA, 19 bp, Artificial sequence
  Primer
tgactccatggagtcaccc

SEQ ID NO: 13510 - DNA, 19 bp, Artificial sequence
  Primer
ggactccatggagtcccgt

SEQ ID NO: 13511 - DNA, 19 bp, Artificial sequence
  Primer
ggactccatggagtccctg

SEQ ID NO: 13512 - DNA, 19 bp, Artificial sequence
  Primer
ggactccatggagtcctgg

SEQ ID NO: 13513 - DNA, 19 bp, Artificial sequence
  Primer
agactccatggagtctcgg

SEQ ID NO: 13514 - DNA, 19 bp, Artificial sequence
  Primer
ggactccatggagtcccga

SEQ ID NO: 13515 - DNA, 19 bp, Artificial sequence
  Primer
ggactccatggagtcccag

SEQ ID NO: 13516 - DNA, 19 bp, Artificial sequence
  Primer
ggactccatggagtccagg

SEQ ID NO: 13517 - DNA, 19 bp, Artificial sequence
  Primer
tgactccatggagtcacgg

SEQ ID NO: 13518 - DNA, 19 bp, Artificial sequence
  Primer
cgactccatggagtcgccg

SEQ ID NO: 13519 - DNA, 19 bp, Artificial sequence
  Primer
cgactccatggagtcgctg

SEQ ID NO: 13520 - DNA, 19 bp, Artificial sequence
  Primer
cgactccatggagtcgtcg

SEQ ID NO: 13521 - DNA, 19 bp, Artificial sequence
  Primer
agactccatggagtctccg

SEQ ID NO: 13522 - DNA, 19 bp, Artificial sequence
  Primer
cgactccatggagtcgcag

SEQ ID NO: 13523 - DNA, 19 bp, Artificial sequence
  Primer
tgactccatggagtcaccg

SEQ ID NO: 13524 - DNA, 19 bp, Artificial sequence
  Primer
ggactccatggagtccgtg

SEQ ID NO: 13525 - DNA, 19 bp, Artificial sequence
  Primer
agactccatggagtctggg

SEQ ID NO: 13526 - DNA, 19 bp, Artificial sequence
  Primer
ggactccatggagtccgag

SEQ ID NO: 13527 - DNA, 19 bp, Artificial sequence
  Primer
tgactccatggagtcaggg

SEQ ID NO: 13528 - DNA, 19 bp, Artificial sequence
  Primer
cgactccatggagtcgtgg

SEQ ID NO: 13529 - DNA, 19 bp, Artificial sequence
  Primer
cgactccatggagtcggct

SEQ ID NO: 13530 - DNA, 19 bp, Artificial sequence
  Primer
cgactccatggagtcggca

SEQ ID NO: 13531 - DNA, 19 bp, Artificial sequence
  Primer
agactccatggagtctcgc

SEQ ID NO: 13532 - DNA, 19 bp, Artificial sequence
  Primer
tgactccatggagtcacgc

SEQ ID NO: 13533 - DNA, 19 bp, Artificial sequence
  Primer
ggactccatggagtcctgc

SEQ ID NO: 13534 - DNA, 19 bp, Artificial sequence
  Primer
ggactccatggagtccagc

SEQ ID NO: 13535 - DNA, 19 bp, Artificial sequence
  Primer
ggactccatggagtcctcg

SEQ ID NO: 13536 - DNA, 19 bp, Artificial sequence
  Primer
ggactccatggagtccacg

SEQ ID NO: 13537 - DNA, 19 bp, Artificial sequence
  Primer
cgactccatggagtcggtg

SEQ ID NO: 13538 - DNA, 19 bp, Artificial sequence
  Primer
cgactccatggagtcggag

SEQ ID NO: 13539 - DNA, 19 bp, Artificial sequence
  Primer
ggactccatggagtcccgc

SEQ ID NO: 13540 - DNA, 19 bp, Artificial sequence
  Primer
ggactccatggagtccctc

SEQ ID NO: 13541 - DNA, 19 bp, Artificial sequence
  Primer
ggactccatggagtcccac

SEQ ID NO: 13542 - DNA, 19 bp, Artificial sequence
  Primer
  misc_feature (1)..(1): n is a, c, g, or t
  misc_feature (16)..(19): n is a, c, g, or t
ngactctcgagagtcnnnn

SEQ ID NO: 13543 - DNA, 19 bp, Artificial sequence
  Primer
ggactctcgagagtccgcc

SEQ ID NO: 13544 - DNA, 19 bp, Artificial sequence
  Primer
ggactctcgagagtccgct

SEQ ID NO: 13545 - DNA, 19 bp, Artificial sequence
  Primer
ggactctcgagagtccgtc

SEQ ID NO: 13546 - DNA, 19 bp, Artificial sequence
  Primer
ggactctcgagagtcctcc

SEQ ID NO: 13547 - DNA, 19 bp, Artificial sequence
  Primer
agactctcgagagtctgcc

SEQ ID NO: 13548 - DNA, 19 bp, Artificial sequence
  Primer
ggactctcgagagtccgca

SEQ ID NO: 13549 - DNA, 19 bp, Artificial sequence
  Primer
ggactctcgagagtccgac

SEQ ID NO: 13550 - DNA, 19 bp, Artificial sequence
  Primer
ggactctcgagagtccacc

SEQ ID NO: 13551 - DNA, 19 bp, Artificial sequence
  Primer
tgactctcgagagtcagcc

SEQ ID NO: 13552 - DNA, 19 bp, Artificial sequence
  Primer
cgactctcgagagtcgggc

SEQ ID NO: 13553 - DNA, 19 bp, Artificial sequence
  Primer
cgactctcgagagtcgggt

SEQ ID NO: 13554 - DNA, 19 bp, Artificial sequence
  Primer
cgactctcgagagtcggtc

SEQ ID NO: 13555 - DNA, 19 bp, Artificial sequence
  Primer
cgactctcgagagtcgtgc

SEQ ID NO: 13556 - DNA, 19 bp, Artificial sequence
  Primer
agactctcgagagtctggc

SEQ ID NO: 13557 - DNA, 19 bp, Artificial sequence
  Primer
cgactctcgagagtcggga

SEQ ID NO: 13558 - DNA, 19 bp, Artificial sequence
  Primer
cgactctcgagagtcggac

SEQ ID NO: 13559 - DNA, 19 bp, Artificial sequence
  Primer
tgactctcgagagtcaggc

SEQ ID NO: 13560 - DNA, 19 bp, Artificial sequence
  Primer
cgactctcgagagtcgccc

SEQ ID NO: 13561 - DNA, 19 bp, Artificial sequence
  Primer
cgactctcgagagtcgcct

SEQ ID NO: 13562 - DNA, 19 bp, Artificial sequence
  Primer
cgactctcgagagtcgctc

SEQ ID NO: 13563 - DNA, 19 bp, Artificial sequence
  Primer
cgactctcgagagtcgtcc

SEQ ID NO: 13564 - DNA, 19 bp, Artificial sequence
  Primer
agactctcgagagtctccc

SEQ ID NO: 13565 - DNA, 19 bp, Artificial sequence
  Primer
cgactctcgagagtcgcca

SEQ ID NO: 13566 - DNA, 19 bp, Artificial sequence
  Primer
cgactctcgagagtcgcac

SEQ ID NO: 13567 - DNA, 19 bp, Artificial sequence
  Primer
tgactctcgagagtcaccc

SEQ ID NO: 13568 - DNA, 19 bp, Artificial sequence
  Primer
ggactctcgagagtcccgt

SEQ ID NO: 13569 - DNA, 19 bp, Artificial sequence
  Primer
ggactctcgagagtccctg

SEQ ID NO: 13570 - DNA, 19 bp, Artificial sequence
  Primer
ggactctcgagagtcctgg

SEQ ID NO: 13571 - DNA, 19 bp, Artificial sequence
  Primer
agactctcgagagtctcgg

SEQ ID NO: 13572 - DNA, 19 bp, Artificial sequence
  Primer
ggactctcgagagtcccga

SEQ ID NO: 13573 - DNA, 19 bp, Artificial sequence
  Primer
ggactctcgagagtcccag

SEQ ID NO: 13574 - DNA, 19 bp, Artificial sequence
  Primer
ggactctcgagagtccagg

SEQ ID NO: 13575 - DNA, 19 bp, Artificial sequence
  Primer
tgactctcgagagtcacgg

SEQ ID NO: 13576 - DNA, 19 bp, Artificial sequence
  Primer
cgactctcgagagtcgccg

SEQ ID NO: 13577 - DNA, 19 bp, Artificial sequence
  Primer
cgactctcgagagtcgctg

SEQ ID NO: 13578 - DNA, 19 bp, Artificial sequence
  Primer
cgactctcgagagtcgtcg

SEQ ID NO: 13579 - DNA, 19 bp, Artificial sequence
  Primer
agactctcgagagtctccg

SEQ ID NO: 13580 - DNA, 19 bp, Artificial sequence
  Primer
cgactctcgagagtcgcag

SEQ ID NO: 13581 - DNA, 19 bp, Artificial sequence
  Primer
tgactctcgagagtcaccg

SEQ ID NO: 13582 - DNA, 19 bp, Artificial sequence
  Primer
ggactctcgagagtccgtg

SEQ ID NO: 13583 - DNA, 19 bp, Artificial sequence
  Primer
agactctcgagagtctggg

SEQ ID NO: 13584 - DNA, 19 bp, Artificial sequence
  Primer
ggactctcgagagtccgag

SEQ ID NO: 13585 - DNA, 19 bp, Artificial sequence
  Primer
tgactctcgagagtcaggg

SEQ ID NO: 13586 - DNA, 19 bp, Artificial sequence
  Primer
cgactctcgagagtcgtgg

SEQ ID NO: 13587 - DNA, 19 bp, Artificial sequence
  Primer
cgactctcgagagtcggct

SEQ ID NO: 13588 - DNA, 19 bp, Artificial sequence
  Primer
cgactctcgagagtcggca

SEQ ID NO: 13589 - DNA, 19 bp, Artificial sequence
  Primer
agactctcgagagtctcgc

SEQ ID NO: 13590 - DNA, 19 bp, Artificial sequence
  Primer
tgactctcgagagtcacgc

SEQ ID NO: 13591 - DNA, 19 bp, Artificial sequence
  Primer
ggactctcgagagtcctgc

SEQ ID NO: 13592 - DNA, 19 bp, Artificial sequence
  Primer
ggactctcgagagtccagc

SEQ ID NO: 13593 - DNA, 19 bp, Artificial sequence
  Primer
ggactctcgagagtcctcg

SEQ ID NO: 13594 - DNA, 19 bp, Artificial sequence
  Primer
ggactctcgagagtccacg

SEQ ID NO: 13595 - DNA, 19 bp, Artificial sequence
  Primer
cgactctcgagagtcggtg

SEQ ID NO: 13596 - DNA, 19 bp, Artificial sequence
  Primer
cgactctcgagagtcggag

SEQ ID NO: 13597 - DNA, 19 bp, Artificial sequence
  Primer
ggactctcgagagtcccgc

SEQ ID NO: 13598 - DNA, 19 bp, Artificial sequence
  Primer
ggactctcgagagtccctc

SEQ ID NO: 13599 - DNA, 19 bp, Artificial sequence
  Primer
ggactctcgagagtcccac

SEQ ID NO: 13600 - DNA, 19 bp, Artificial sequence
  Primer
  misc_feature (1)..(1): n is a, c, g, or t
  misc_feature (16)..(19): n is a, c, g, or t
ngactcagctgagtcnnnn

SEQ ID NO: 13601 - DNA, 19 bp, Artificial sequence
  Primer
ggactcagctgagtccgcc

SEQ ID NO: 13602 - DNA, 19 bp, Artificial sequence
  Primer
ggactcagctgagtccgct

SEQ ID NO: 13603 - DNA, 19 bp, Artificial sequence
  Primer
ggactcagctgagtccgtc

SEQ ID NO: 13604 - DNA, 19 bp, Artificial sequence
  Primer
ggactcagctgagtcctcc

SEQ ID NO: 13605 - DNA, 19 bp, Artificial sequence
  Primer
agactcagctgagtctgcc

SEQ ID NO: 13606 - DNA, 19 bp, Artificial sequence
  Primer
ggactcagctgagtccgca

SEQ ID NO: 13607 - DNA, 19 bp, Artificial sequence
  Primer
ggactcagctgagtccgac

SEQ ID NO: 13608 - DNA, 19 bp, Artificial sequence
  Primer
ggactcagctgagtccacc

SEQ ID NO: 13609 - DNA, 19 bp, Artificial sequence
  Primer
tgactcagctgagtcagcc

SEQ ID NO: 13610 - DNA, 19 bp, Artificial sequence
  Primer
cgactcagctgagtcgggc

SEQ ID NO: 13611 - DNA, 19 bp, Artificial sequence
  Primer
cgactcagctgagtcgggt

SEQ ID NO: 13612 - DNA, 19 bp, Artificial sequence
  Primer
cgactcagctgagtcggtc

SEQ ID NO: 13613 - DNA, 19 bp, Artificial sequence
  Primer
cgactcagctgagtcgtgc

SEQ ID NO: 13614 - DNA, 19 bp, Artificial sequence
  Primer
agactcagctgagtctggc

SEQ ID NO: 13615 - DNA, 19 bp, Artificial sequence
  Primer
cgactcagctgagtcggga

SEQ ID NO: 13616 - DNA, 19 bp, Artificial sequence
  Primer
cgactcagctgagtcggac

SEQ ID NO: 13617 - DNA, 19 bp, Artificial sequence
  Primer
tgactcagctgagtcaggc

SEQ ID NO: 13618 - DNA, 19 bp, Artificial sequence
  Primer
cgactcagctgagtcgccc

SEQ ID NO: 13619 - DNA, 19 bp, Artificial sequence
  Primer
cgactcagctgagtcgcct

SEQ ID NO: 13620 - DNA, 19 bp, Artificial sequence
  Primer
cgactcagctgagtcgctc

SEQ ID NO: 13621 - DNA, 19 bp, Artificial sequence
  Primer
cgactcagctgagtcgtcc

SEQ ID NO: 13622 - DNA, 19 bp, Artificial sequence
  Primer
agactcagctgagtctccc

SEQ ID NO: 13623 - DNA, 19 bp, Artificial sequence
  Primer
cgactcagctgagtcgcca

SEQ ID NO: 13624 - DNA, 19 bp, Artificial sequence
  Primer
cgactcagctgagtcgcac

SEQ ID NO: 13625 - DNA, 19 bp, Artificial sequence
  Primer
tgactcagctgagtcaccc

SEQ ID NO: 13626 - DNA, 19 bp, Artificial sequence
  Primer
ggactcagctgagtcccgt

SEQ ID NO: 13627 - DNA, 19 bp, Artificial sequence
  Primer
ggactcagctgagtccctg

SEQ ID NO: 13628 - DNA, 19 bp, Artificial sequence
  Primer
ggactcagctgagtcctgg

SEQ ID NO: 13629 - DNA, 19 bp, Artificial sequence
  Primer
agactcagctgagtctcgg

SEQ ID NO: 13630 - DNA, 19 bp, Artificial sequence
  Primer
ggactcagctgagtcccga

SEQ ID NO: 13631 - DNA, 19 bp, Artificial sequence
  Primer
ggactcagctgagtcccag

SEQ ID NO: 13632 - DNA, 19 bp, Artificial sequence
  Primer
ggactcagctgagtccagg

SEQ ID NO: 13633 - DNA, 19 bp, Artificial sequence
  Primer
tgactcagctgagtcacgg

SEQ ID NO: 13634 - DNA, 19 bp, Artificial sequence
  Primer
cgactcagctgagtcgccg

SEQ ID NO: 13635 - DNA, 19 bp, Artificial sequence
  Primer
cgactcagctgagtcgctg

SEQ ID NO: 13636 - DNA, 19 bp, Artificial sequence
  Primer
cgactcagctgagtcgtcg

SEQ ID NO: 13637 - DNA, 19 bp, Artificial sequence
  Primer
agactcagctgagtctccg

SEQ ID NO: 13638 - DNA, 19 bp, Artificial sequence
  Primer
cgactcagctgagtcgcag

SEQ ID NO: 13639 - DNA, 19 bp, Artificial sequence
  Primer
tgactcagctgagtcaccg

SEQ ID NO: 13640 - DNA, 19 bp, Artificial sequence
  Primer
ggactcagctgagtccgtg

SEQ ID NO: 13641 - DNA, 19 bp, Artificial sequence
  Primer
agactcagctgagtctggg

SEQ ID NO: 13642 - DNA, 19 bp, Artificial sequence
  Primer
ggactcagctgagtccgag

SEQ ID NO: 13643 - DNA, 19 bp, Artificial sequence
  Primer
tgactcagctgagtcaggg

SEQ ID NO: 13644 - DNA, 19 bp, Artificial sequence
  Primer
cgactcagctgagtcgtgg

SEQ ID NO: 13645 - DNA, 19 bp, Artificial sequence
  Primer
cgactcagctgagtcggct

SEQ ID NO: 13646 - DNA, 19 bp, Artificial sequence
  Primer
cgactcagctgagtcggca

SEQ ID NO: 13647 - DNA, 19 bp, Artificial sequence
  Primer
agactcagctgagtctcgc

SEQ ID NO: 13648 - DNA, 19 bp, Artificial sequence
  Primer
tgactcagctgagtcacgc

SEQ ID NO: 13649 - DNA, 19 bp, Artificial sequence
  Primer
ggactcagctgagtcctgc

SEQ ID NO: 13650 - DNA, 19 bp, Artificial sequence
  Primer
ggactcagctgagtccagc

SEQ ID NO: 13651 - DNA, 19 bp, Artificial sequence
  Primer
ggactcagctgagtcctcg

SEQ ID NO: 13652 - DNA, 19 bp, Artificial sequence
  Primer
ggactcagctgagtccacg

SEQ ID NO: 13653 - DNA, 19 bp, Artificial sequence
  Primer
cgactcagctgagtcggtg

SEQ ID NO: 13654 - DNA, 19 bp, Artificial sequence
  Primer
cgactcagctgagtcggag

SEQ ID NO: 13655 - DNA, 19 bp, Artificial sequence
  Primer
ggactcagctgagtcccgc

SEQ ID NO: 13656 - DNA, 19 bp, Artificial sequence
  Primer
ggactcagctgagtccctc

SEQ ID NO: 13657 - DNA, 19 bp, Artificial sequence
  Primer
ggactcagctgagtcccac

SEQ ID NO: 13658 - DNA, 19 bp, Artificial sequence
  Primer
  misc_feature (1)..(1): n is a, c, g, or t
  misc_feature (16)..(19): n is a, c, g, or t
ngactcaattgagtcnnnn

SEQ ID NO: 13659 - DNA, 19 bp, Artificial sequence
  Primer
ggactcaattgagtccgcc

SEQ ID NO: 13660 - DNA, 19 bp, Artificial sequence
  Primer
ggactcaattgagtccgct

SEQ ID NO: 13661 - DNA, 19 bp, Artificial sequence
  Primer
ggactcaattgagtccgtc

SEQ ID NO: 13662 - DNA, 19 bp, Artificial sequence
  Primer
ggactcaattgagtcctcc

SEQ ID NO: 13663 - DNA, 19 bp, Artificial sequence
  Primer
agactcaattgagtctgcc

SEQ ID NO: 13664 - DNA, 19 bp, Artificial sequence
  Primer
ggactcaattgagtccgca

SEQ ID NO: 13665 - DNA, 19 bp, Artificial sequence
  Primer
ggactcaattgagtccgac

SEQ ID NO: 13666 - DNA, 19 bp, Artificial sequence
  Primer
ggactcaattgagtccacc

SEQ ID NO: 13667 - DNA, 19 bp, Artificial sequence
  Primer
tgactcaattgagtcagcc

SEQ ID NO: 13668 - DNA, 19 bp, Artificial sequence
  Primer
cgactcaattgagtcgggc

SEQ ID NO: 13669 - DNA, 19 bp, Artificial sequence
  Primer
cgactcaattgagtcgggt

SEQ ID NO: 13670 - DNA, 19 bp, Artificial sequence
  Primer
cgactcaattgagtcggtc

SEQ ID NO: 13671 - DNA, 19 bp, Artificial sequence
  Primer
cgactcaattgagtcgtgc

SEQ ID NO: 13672 - DNA, 19 bp, Artificial sequence
  Primer
agactcaattgagtctggc

SEQ ID NO: 13673 - DNA, 19 bp, Artificial sequence
  Primer
cgactcaattgagtcggga

SEQ ID NO: 13674 - DNA, 19 bp, Artificial sequence
  Primer
cgactcaattgagtcggac

SEQ ID NO: 13675 - DNA, 19 bp, Artificial sequence
  Primer
tgactcaattgagtcaggc

SEQ ID NO: 13676 - DNA, 19 bp, Artificial sequence
  Primer
cgactcaattgagtcgccc

SEQ ID NO: 13677 - DNA, 19 bp, Artificial sequence
  Primer
cgactcaattgagtcgcct

SEQ ID NO: 13678 - DNA, 19 bp, Artificial sequence
  Primer
cgactcaattgagtcgctc

SEQ ID NO: 13679 - DNA, 19 bp, Artificial sequence
  Primer
cgactcaattgagtcgtcc

SEQ ID NO: 13680 - DNA, 19 bp, Artificial sequence
  Primer
agactcaattgagtctccc

SEQ ID NO: 13681 - DNA, 19 bp, Artificial sequence
  Primer
cgactcaattgagtcgcca

SEQ ID NO: 13682 - DNA, 19 bp, Artificial sequence
  Primer
cgactcaattgagtcgcac

SEQ ID NO: 13683 - DNA, 19 bp, Artificial sequence
  Primer
tgactcaattgagtcaccc

SEQ ID NO: 13684 - DNA, 19 bp, Artificial sequence
  Primer
ggactcaattgagtcccgt

SEQ ID NO: 13685 - DNA, 19 bp, Artificial sequence
  Primer
ggactcaattgagtccctg

SEQ ID NO: 13686 - DNA, 19 bp, Artificial sequence
  Primer
ggactcaattgagtcctgg

SEQ ID NO: 13687 - DNA, 19 bp, Artificial sequence
  Primer
agactcaattgagtctcgg

SEQ ID NO: 13688 - DNA, 19 bp, Artificial sequence
  Primer
ggactcaattgagtcccga

SEQ ID NO: 13689 - DNA, 19 bp, Artificial sequence
  Primer
ggactcaattgagtcccag

SEQ ID NO: 13690 - DNA, 19 bp, Artificial sequence
  Primer
ggactcaattgagtccagg

SEQ ID NO: 13691 - DNA, 19 bp, Artificial sequence
  Primer
tgactcaattgagtcacgg

SEQ ID NO: 13692 - DNA, 19 bp, Artificial sequence
  Primer
cgactcaattgagtcgccg

SEQ ID NO: 13693 - DNA, 19 bp, Artificial sequence
  Primer
cgactcaattgagtcgctg

SEQ ID NO: 13694 - DNA, 19 bp, Artificial sequence
  Primer
cgactcaattgagtcgtcg

SEQ ID NO: 13695 - DNA, 19 bp, Artificial sequence
  Primer
agactcaattgagtctccg

SEQ ID NO: 13696 - DNA, 19 bp, Artificial sequence
  Primer
cgactcaattgagtcgcag

SEQ ID NO: 13697 - DNA, 19 bp, Artificial sequence
  Primer
tgactcaattgagtcaccg

SEQ ID NO: 13698 - DNA, 19 bp, Artificial sequence
  Primer
ggactcaattgagtccgtg

SEQ ID NO: 13699 - DNA, 19 bp, Artificial sequence
  Primer
agactcaattgagtctggg

SEQ ID NO: 13700 - DNA, 19 bp, Artificial sequence
  Primer
ggactcaattgagtccgag

SEQ ID NO: 13701 - DNA, 19 bp, Artificial sequence
  Primer
tgactcaattgagtcaggg

SEQ ID NO: 13702 - DNA, 19 bp, Artificial sequence
  Primer
cgactcaattgagtcgtgg

SEQ ID NO: 13703 - DNA, 19 bp, Artificial sequence
  Primer
cgactcaattgagtcggct

SEQ ID NO: 13704 - DNA, 19 bp, Artificial sequence
  Primer
cgactcaattgagtcggca

SEQ ID NO: 13705 - DNA, 19 bp, Artificial sequence
  Primer
agactcaattgagtctcgc

SEQ ID NO: 13706 - DNA, 19 bp, Artificial sequence
  Primer
tgactcaattgagtcacgc

SEQ ID NO: 13707 - DNA, 19 bp, Artificial sequence
  Primer
ggactcaattgagtcctgc

SEQ ID NO: 13708 - DNA, 19 bp, Artificial sequence
  Primer
ggactcaattgagtccagc

SEQ ID NO: 13709 - DNA, 19 bp, Artificial sequence
  Primer
ggactcaattgagtcctcg

SEQ ID NO: 13710 - DNA, 19 bp, Artificial sequence
  Primer
ggactcaattgagtccacg

SEQ ID NO: 13711 - DNA, 19 bp, Artificial sequence
  Primer
cgactcaattgagtcggtg

SEQ ID NO: 13712 - DNA, 19 bp, Artificial sequence
  Primer
cgactcaattgagtcggag

SEQ ID NO: 13713 - DNA, 19 bp, Artificial sequence
  Primer
ggactcaattgagtcccgc

SEQ ID NO: 13714 - DNA, 19 bp, Artificial sequence
  Primer
ggactcaattgagtccctc

SEQ ID NO: 13715 - DNA, 19 bp, Artificial sequence
  Primer
ggactcaattgagtcccac

SEQ ID NO: 13716 - DNA, 19 bp, Artificial sequence
  Primer
  misc_feature (1)..(1): n is a, c, g, or t
  misc_feature (16)..(19): n is a, c, g, or t
ngactctatagagtcnnnn

SEQ ID NO: 13717 - DNA, 19 bp, Artificial sequence
  Primer
ggactctatagagtccgcc

SEQ ID NO: 13718 - DNA, 19 bp, Artificial sequence
  Primer
ggactctatagagtccgct

SEQ ID NO: 13719 - DNA, 19 bp, Artificial sequence
  Primer
ggactctatagagtccgtc

SEQ ID NO: 13720 - DNA, 19 bp, Artificial sequence
  Primer
ggactctatagagtcctcc

SEQ ID NO: 13721 - DNA, 19 bp, Artificial sequence
  Primer
agactctatagagtctgcc

SEQ ID NO: 13722 - DNA, 19 bp, Artificial sequence
  Primer
ggactctatagagtccgca

SEQ ID NO: 13723 - DNA, 19 bp, Artificial sequence
  Primer
ggactctatagagtccgac

SEQ ID NO: 13724 - DNA, 19 bp, Artificial sequence
  Primer
ggactctatagagtccacc

SEQ ID NO: 13725 - DNA, 19 bp, Artificial sequence
  Primer
tgactctatagagtcagcc

SEQ ID NO: 13726 - DNA, 19 bp, Artificial sequence
  Primer
cgactctatagagtcgggc

SEQ ID NO: 13727 - DNA, 19 bp, Artificial sequence
  Primer
cgactctatagagtcgggt

SEQ ID NO: 13728 - DNA, 19 bp, Artificial sequence
  Primer
cgactctatagagtcggtc

SEQ ID NO: 13729 - DNA, 19 bp, Artificial sequence
  Primer
cgactctatagagtcgtgc

SEQ ID NO: 13730 - DNA, 19 bp, Artificial sequence
  Primer
agactctatagagtctggc

SEQ ID NO: 13731 - DNA, 19 bp, Artificial sequence
  Primer
cgactctatagagtcggga

SEQ ID NO: 13732 - DNA, 19 bp, Artificial sequence
  Primer
cgactctatagagtcggac

SEQ ID NO: 13733 - DNA, 19 bp, Artificial sequence
  Primer
tgactctatagagtcaggc

SEQ ID NO: 13734 - DNA, 19 bp, Artificial sequence
  Primer
cgactctatagagtcgccc

SEQ ID NO: 13735 - DNA, 19 bp, Artificial sequence
  Primer
cgactctatagagtcgcct

SEQ ID NO: 13736 - DNA, 19 bp, Artificial sequence
  Primer
cgactctatagagtcgctc

SEQ ID NO: 13737 - DNA, 19 bp, Artificial sequence
  Primer
cgactctatagagtcgtcc

SEQ ID NO: 13738 - DNA, 19 bp, Artificial sequence
  Primer
agactctatagagtctccc

SEQ ID NO: 13739 - DNA, 19 bp, Artificial sequence
  Primer
cgactctatagagtcgcca

SEQ ID NO: 13740 - DNA, 19 bp, Artificial sequence
  Primer
cgactctatagagtcgcac

SEQ ID NO: 13741 - DNA, 19 bp, Artificial sequence
  Primer
tgactctatagagtcaccc

SEQ ID NO: 13742 - DNA, 19 bp, Artificial sequence
  Primer
ggactctatagagtcccgt

SEQ ID NO: 13743 - DNA, 19 bp, Artificial sequence
  Primer
ggactctatagagtccctg

SEQ ID NO: 13744 - DNA, 19 bp, Artificial sequence
  Primer
ggactctatagagtcctgg

SEQ ID NO: 13745 - DNA, 19 bp, Artificial sequence
  Primer
agactctatagagtctcgg

SEQ ID NO: 13746 - DNA, 19 bp, Artificial sequence
  Primer
ggactctatagagtcccga

SEQ ID NO: 13747 - DNA, 19 bp, Artificial sequence
  Primer
ggactctatagagtcccag

SEQ ID NO: 13748 - DNA, 19 bp, Artificial sequence
  Primer
ggactctatagagtccagg

SEQ ID NO: 13749 - DNA, 19 bp, Artificial sequence
  Primer
tgactctatagagtcacgg

SEQ ID NO: 13750 - DNA, 19 bp, Artificial sequence
  Primer
cgactctatagagtcgccg

SEQ ID NO: 13751 - DNA, 19 bp, Artificial sequence
  Primer
cgactctatagagtcgctg

SEQ ID NO: 13752 - DNA, 19 bp, Artificial sequence
  Primer
cgactctatagagtcgtcg

SEQ ID NO: 13753 - DNA, 19 bp, Artificial sequence
  Primer
agactctatagagtctccg

SEQ ID NO: 13754 - DNA, 19 bp, Artificial sequence
  Primer
cgactctatagagtcgcag

SEQ ID NO: 13755 - DNA, 19 bp, Artificial sequence
  Primer
tgactctatagagtcaccg

SEQ ID NO: 13756 - DNA, 19 bp, Artificial sequence
  Primer
ggactctatagagtccgtg

SEQ ID NO: 13757 - DNA, 19 bp, Artificial sequence
  Primer
agactctatagagtctggg

SEQ ID NO: 13758 - DNA, 19 bp, Artificial sequence
  Primer
ggactctatagagtccgag

SEQ ID NO: 13759 - DNA, 19 bp, Artificial sequence
  Primer
tgactctatagagtcaggg

SEQ ID NO: 13760 - DNA, 19 bp, Artificial sequence
  Primer
cgactctatagagtcgtgg

SEQ ID NO: 13761 - DNA, 19 bp, Artificial sequence
  Primer
cgactctatagagtcggct

SEQ ID NO: 13762 - DNA, 19 bp, Artificial sequence
  Primer
cgactctatagagtcggca

SEQ ID NO: 13763 - DNA, 19 bp, Artificial sequence
  Primer
agactctatagagtctcgc

SEQ ID NO: 13764 - DNA, 19 bp, Artificial sequence
  Primer
tgactctatagagtcacgc

SEQ ID NO: 13765 - DNA, 19 bp, Artificial sequence
  Primer
ggactctatagagtcctgc

SEQ ID NO: 13766 - DNA, 19 bp, Artificial sequence
  Primer
ggactctatagagtccagc

SEQ ID NO: 13767 - DNA, 19 bp, Artificial sequence
  Primer
ggactctatagagtcctcg

SEQ ID NO: 13768 - DNA, 19 bp, Artificial sequence
  Primer
ggactctatagagtccacg

SEQ ID NO: 13769 - DNA, 19 bp, Artificial sequence
  Primer
cgactctatagagtcggtg

SEQ ID NO: 13770 - DNA, 19 bp, Artificial sequence
  Primer
cgactctatagagtcggag

SEQ ID NO: 13771 - DNA, 19 bp, Artificial sequence
  Primer
ggactctatagagtcccgc

SEQ ID NO: 13772 - DNA, 19 bp, Artificial sequence
  Primer
ggactctatagagtccctc

SEQ ID NO: 13773 - DNA, 19 bp, Artificial sequence
  Primer
ggactctatagagtcccac

SEQ ID NO: 13774 - DNA, 19 bp, Artificial sequence
  Primer
  misc_feature (1)..(1): n is a, c, g, or t
  misc_feature (16)..(19): n is a, c, g, or t
ngactcatatgagtcnnnn

SEQ ID NO: 13775 - DNA, 19 bp, Artificial sequence
  Primer
ggactcatatgagtccgcc

SEQ ID NO: 13776 - DNA, 19 bp, Artificial sequence
  Primer
ggactcatatgagtccgct

SEQ ID NO: 13777 - DNA, 19 bp, Artificial sequence
  Primer
ggactcatatgagtccgtc

SEQ ID NO: 13778 - DNA, 19 bp, Artificial sequence
  Primer
ggactcatatgagtcctcc

SEQ ID NO: 13779 - DNA, 19 bp, Artificial sequence
  Primer
agactcatatgagtctgcc

SEQ ID NO: 13780 - DNA, 19 bp, Artificial sequence
  Primer
ggactcatatgagtccgca

SEQ ID NO: 13781 - DNA, 19 bp, Artificial sequence
  Primer
ggactcatatgagtccgac

SEQ ID NO: 13782 - DNA, 19 bp, Artificial sequence
  Primer
ggactcatatgagtccacc

SEQ ID NO: 13783 - DNA, 19 bp, Artificial sequence
  Primer
tgactcatatgagtcagcc

SEQ ID NO: 13784 - DNA, 19 bp, Artificial sequence
  Primer
cgactcatatgagtcgggc

SEQ ID NO: 13785 - DNA, 19 bp, Artificial sequence
  Primer
cgactcatatgagtcgggt

SEQ ID NO: 13786 - DNA, 19 bp, Artificial sequence
  Primer
cgactcatatgagtcggtc

SEQ ID NO: 13787 - DNA, 19 bp, Artificial sequence
  Primer
cgactcatatgagtcgtgc

SEQ ID NO: 13788 - DNA, 19 bp, Artificial sequence
  Primer
agactcatatgagtctggc

SEQ ID NO: 13789 - DNA, 19 bp, Artificial sequence
  Primer
cgactcatatgagtcggga

SEQ ID NO: 13790 - DNA, 19 bp, Artificial sequence
  Primer
cgactcatatgagtcggac

SEQ ID NO: 13791 - DNA, 19 bp, Artificial sequence
  Primer
tgactcatatgagtcaggc

SEQ ID NO: 13792 - DNA, 19 bp, Artificial sequence
  Primer
cgactcatatgagtcgccc

SEQ ID NO: 13793 - DNA, 19 bp, Artificial sequence
  Primer
cgactcatatgagtcgcct

SEQ ID NO: 13794 - DNA, 19 bp, Artificial sequence
  Primer
cgactcatatgagtcgctc

SEQ ID NO: 13795 - DNA, 19 bp, Artificial sequence
  Primer
cgactcatatgagtcgtcc

SEQ ID NO: 13796 - DNA, 19 bp, Artificial sequence
  Primer
agactcatatgagtctccc

SEQ ID NO: 13797 - DNA, 19 bp, Artificial sequence
  Primer
cgactcatatgagtcgcca

SEQ ID NO: 13798 - DNA, 19 bp, Artificial sequence
  Primer
cgactcatatgagtcgcac

SEQ ID NO: 13799 - DNA, 19 bp, Artificial sequence
  Primer
tgactcatatgagtcaccc

SEQ ID NO: 13800 - DNA, 19 bp, Artificial sequence
  Primer
ggactcatatgagtcccgt

SEQ ID NO: 13801 - DNA, 19 bp, Artificial sequence
  Primer
ggactcatatgagtccctg

SEQ ID NO: 13802 - DNA, 19 bp, Artificial sequence
  Primer
ggactcatatgagtcctgg

SEQ ID NO: 13803 - DNA, 19 bp, Artificial sequence
  Primer
agactcatatgagtctcgg

SEQ ID NO: 13804 - DNA, 19 bp, Artificial sequence
  Primer
ggactcatatgagtcccga

SEQ ID NO: 13805 - DNA, 19 bp, Artificial sequence
  Primer
ggactcatatgagtcccag

SEQ ID NO: 13806 - DNA, 19 bp, Artificial sequence
  Primer
ggactcatatgagtccagg

SEQ ID NO: 13807 - DNA, 19 bp, Artificial sequence
  Primer
tgactcatatgagtcacgg

SEQ ID NO: 13808 - DNA, 19 bp, Artificial sequence
  Primer
cgactcatatgagtcgccg

SEQ ID NO: 13809 - DNA, 19 bp, Artificial sequence
  Primer
cgactcatatgagtcgctg

SEQ ID NO: 13810 - DNA, 19 bp, Artificial sequence
  Primer
cgactcatatgagtcgtcg

SEQ ID NO: 13811 - DNA, 19 bp, Artificial sequence
  Primer
agactcatatgagtctccg

SEQ ID NO: 13812 - DNA, 19 bp, Artificial sequence
  Primer
cgactcatatgagtcgcag

SEQ ID NO: 13813 - DNA, 19 bp, Artificial sequence
  Primer
tgactcatatgagtcaccg

SEQ ID NO: 13814 - DNA, 19 bp, Artificial sequence
  Primer
ggactcatatgagtccgtg

SEQ ID NO: 13815 - DNA, 19 bp, Artificial sequence
  Primer
agactcatatgagtctggg

SEQ ID NO: 13816 - DNA, 19 bp, Artificial sequence
  Primer
ggactcatatgagtccgag

SEQ ID NO: 13817 - DNA, 19 bp, Artificial sequence
  Primer
tgactcatatgagtcaggg

SEQ ID NO: 13818 - DNA, 19 bp, Artificial sequence
  Primer
cgactcatatgagtcgtgg

SEQ ID NO: 13819 - DNA, 19 bp, Artificial sequence
  Primer
cgactcatatgagtcggct

SEQ ID NO: 13820 - DNA, 19 bp, Artificial sequence
  Primer
cgactcatatgagtcggca

SEQ ID NO: 13821 - DNA, 19 bp, Artificial sequence
  Primer
agactcatatgagtctcgc

SEQ ID NO: 13822 - DNA, 19 bp, Artificial sequence
  Primer
tgactcatatgagtcacgc

SEQ ID NO: 13823 - DNA, 19 bp, Artificial sequence
  Primer
ggactcatatgagtcctgc

SEQ ID NO: 13824 - DNA, 19 bp, Artificial sequence
  Primer
ggactcatatgagtccagc

SEQ ID NO: 13825 - DNA, 19 bp, Artificial sequence
  Primer
ggactcatatgagtcctcg

SEQ ID NO: 13826 - DNA, 19 bp, Artificial sequence
  Primer
ggactcatatgagtccacg

SEQ ID NO: 13827 - DNA, 19 bp, Artificial sequence
  Primer
cgactcatatgagtcggtg

SEQ ID NO: 13828 - DNA, 19 bp, Artificial sequence
  Primer
cgactcatatgagtcggag

SEQ ID NO: 13829 - DNA, 19 bp, Artificial sequence
  Primer
ggactcatatgagtcccgc

SEQ ID NO: 13830 - DNA, 19 bp, Artificial sequence
  Primer
ggactcatatgagtccctc

SEQ ID NO: 13831 - DNA, 19 bp, Artificial sequence
  Primer
ggactcatatgagtcccac

SEQ ID NO: 13832 - DNA, 19 bp, Artificial sequence
  Primer
  misc_feature (1)..(1): n is a, c, g, or t
  misc_feature (16)..(19): n is a, c, g, or t
ngactcttaagagtcnnnn

SEQ ID NO: 13833 - DNA, 19 bp, Artificial sequence
  Primer
ggactcttaagagtccgcc

SEQ ID NO: 13834 - DNA, 19 bp, Artificial sequence
  Primer
ggactcttaagagtccgct

SEQ ID NO: 13835 - DNA, 19 bp, Artificial sequence
  Primer
ggactcttaagagtccgtc

SEQ ID NO: 13836 - DNA, 19 bp, Artificial sequence
  Primer
ggactcttaagagtcctcc

SEQ ID NO: 13837 - DNA, 19 bp, Artificial sequence
  Primer
agactcttaagagtctgcc

SEQ ID NO: 13838 - DNA, 19 bp, Artificial sequence
  Primer
ggactcttaagagtccgca

SEQ ID NO: 13839 - DNA, 19 bp, Artificial sequence
  Primer
ggactcttaagagtccgac

SEQ ID NO: 13840 - DNA, 19 bp, Artificial sequence
  Primer
ggactcttaagagtccacc

SEQ ID NO: 13841 - DNA, 19 bp, Artificial sequence
  Primer
tgactcttaagagtcagcc

SEQ ID NO: 13842 - DNA, 19 bp, Artificial sequence
  Primer
cgactcttaagagtcgggc

SEQ ID NO: 13843 - DNA, 19 bp, Artificial sequence
  Primer
cgactcttaagagtcgggt

SEQ ID NO: 13844 - DNA, 19 bp, Artificial sequence
  Primer
cgactcttaagagtcggtc

SEQ ID NO: 13845 - DNA, 19 bp, Artificial sequence
  Primer
cgactcttaagagtcgtgc

SEQ ID NO: 13846 - DNA, 19 bp, Artificial sequence
  Primer
agactcttaagagtctggc

SEQ ID NO: 13847 - DNA, 19 bp, Artificial sequence
  Primer
cgactcttaagagtcggga

SEQ ID NO: 13848 - DNA, 19 bp, Artificial sequence
  Primer
cgactcttaagagtcggac

SEQ ID NO: 13849 - DNA, 19 bp, Artificial sequence
  Primer
tgactcttaagagtcaggc

SEQ ID NO: 13850 - DNA, 19 bp, Artificial sequence
  Primer
cgactcttaagagtcgccc

SEQ ID NO: 13851 - DNA, 19 bp, Artificial sequence
  Primer
cgactcttaagagtcgcct

SEQ ID NO: 13852 - DNA, 19 bp, Artificial sequence
  Primer
cgactcttaagagtcgctc

SEQ ID NO: 13853 - DNA, 19 bp, Artificial sequence
  Primer
cgactcttaagagtcgtcc

SEQ ID NO: 13854 - DNA, 19 bp, Artificial sequence
  Primer
agactcttaagagtctccc

SEQ ID NO: 13855 - DNA, 19 bp, Artificial sequence
  Primer
cgactcttaagagtcgcca

SEQ ID NO: 13856 - DNA, 19 bp, Artificial sequence
  Primer
cgactcttaagagtcgcac

SEQ ID NO: 13857 - DNA, 19 bp, Artificial sequence
  Primer
tgactcttaagagtcaccc

SEQ ID NO: 13858 - DNA, 19 bp, Artificial sequence
  Primer
ggactcttaagagtcccgt

SEQ ID NO: 13859 - DNA, 19 bp, Artificial sequence
  Primer
ggactcttaagagtccctg

SEQ ID NO: 13860 - DNA, 19 bp, Artificial sequence
  Primer
ggactcttaagagtcctgg

SEQ ID NO: 13861 - DNA, 19 bp, Artificial sequence
  Primer
agactcttaagagtctcgg

SEQ ID NO: 13862 - DNA, 19 bp, Artificial sequence
  Primer
ggactcttaagagtcccga

SEQ ID NO: 13863 - DNA, 19 bp, Artificial sequence
  Primer
ggactcttaagagtcccag

SEQ ID NO: 13864 - DNA, 19 bp, Artificial sequence
  Primer
ggactcttaagagtccagg

SEQ ID NO: 13865 - DNA, 19 bp, Artificial sequence
  Primer
tgactcttaagagtcacgg

SEQ ID NO: 13866 - DNA, 19 bp, Artificial sequence
  Primer
cgactcttaagagtcgccg

SEQ ID NO: 13867 - DNA, 19 bp, Artificial sequence
  Primer
cgactcttaagagtcgctg

SEQ ID NO: 13868 - DNA, 19 bp, Artificial sequence
  Primer
cgactcttaagagtcgtcg

SEQ ID NO: 13869 - DNA, 19 bp, Artificial sequence
  Primer
agactcttaagagtctccg

SEQ ID NO: 13870 - DNA, 19 bp, Artificial sequence
  Primer
cgactcttaagagtcgcag

SEQ ID NO: 13871 - DNA, 19 bp, Artificial sequence
  Primer
tgactcttaagagtcaccg

SEQ ID NO: 13872 - DNA, 19 bp, Artificial sequence
  Primer
ggactcttaagagtccgtg

SEQ ID NO: 13873 - DNA, 19 bp, Artificial sequence
  Primer
agactcttaagagtctggg

SEQ ID NO: 13874 - DNA, 19 bp, Artificial sequence
  Primer
ggactcttaagagtccgag

SEQ ID NO: 13875 - DNA, 19 bp, Artificial sequence
  Primer
tgactcttaagagtcaggg

SEQ ID NO: 13876 - DNA, 19 bp, Artificial sequence
  Primer
cgactcttaagagtcgtgg

SEQ ID NO: 13877 - DNA, 19 bp, Artificial sequence
  Primer
cgactcttaagagtcggct

SEQ ID NO: 13878 - DNA, 19 bp, Artificial sequence
  Primer
cgactcttaagagtcggca

SEQ ID NO: 13879 - DNA, 19 bp, Artificial sequence
  Primer
agactcttaagagtctcgc

SEQ ID NO: 13880 - DNA, 19 bp, Artificial sequence
  Primer
tgactcttaagagtcacgc

SEQ ID NO: 13881 - DNA, 19 bp, Artificial sequence
  Primer
ggactcttaagagtcctgc

SEQ ID NO: 13882 - DNA, 19 bp, Artificial sequence
  Primer
ggactcttaagagtccagc

SEQ ID NO: 13883 - DNA, 19 bp, Artificial sequence
  Primer
ggactcttaagagtcctcg

SEQ ID NO: 13884 - DNA, 19 bp, Artificial sequence
  Primer
ggactcttaagagtccacg

SEQ ID NO: 13885 - DNA, 19 bp, Artificial sequence
  Primer
cgactcttaagagtcggtg

SEQ ID NO: 13886 - DNA, 19 bp, Artificial sequence
  Primer
cgactcttaagagtcggag

SEQ ID NO: 13887 - DNA, 19 bp, Artificial sequence
  Primer
ggactcttaagagtcccgc

SEQ ID NO: 13888 - DNA, 19 bp, Artificial sequence
  Primer
ggactcttaagagtccctc

SEQ ID NO: 13889 - DNA, 19 bp, Artificial sequence
  Primer
ggactcttaagagtcccac

SEQ ID NO: 13890 - DNA, 19 bp, Artificial sequence
  Primer
  misc_feature (1)..(1): n is a, c, g, or t
  misc_feature (7)..(10): n is a, c, g, or t
  misc_feature (16)..(19): n is a, c, g, or t
ngactcnnnngagtcnnnn

SEQ ID NO: 13891 - DNA, 20 bp, Artificial sequence
  Primer
tatgactccgcggagtcata

SEQ ID NO: 13892 - DNA, 20 bp, Artificial sequence
  Primer
aatgactccgcggagtcatt

SEQ ID NO: 13893 - DNA, 20 bp, Artificial sequence
  Primer
gatgactccgcggagtcatc

SEQ ID NO: 13894 - DNA, 20 bp, Artificial sequence
  Primer
taagactccgcggagtctta

SEQ ID NO: 13895 - DNA, 20 bp, Artificial sequence
  Primer
aaagactccgcggagtcttt

SEQ ID NO: 13896 - DNA, 20 bp, Artificial sequence
  Primer
gaagactccgcggagtcttc

SEQ ID NO: 13897 - DNA, 20 bp, Artificial sequence
  Primer
caagactccgcggagtcttg

SEQ ID NO: 13898 - DNA, 20 bp, Artificial sequence
  Primer
taggactccgcggagtccta

SEQ ID NO: 13899 - DNA, 20 bp, Artificial sequence
  Primer
aaggactccgcggagtcctt

SEQ ID NO: 13900 - DNA, 20 bp, Artificial sequence
  Primer
gaggactccgcggagtcctc

SEQ ID NO: 13901 - DNA, 20 bp, Artificial sequence
  Primer
caggactccgcggagtcctg

SEQ ID NO: 13902 - DNA, 20 bp, Artificial sequence
  Primer
tacgactccgcggagtcgta

SEQ ID NO: 13903 - DNA, 20 bp, Artificial sequence
  Primer
aacgactccgcggagtcgtt

SEQ ID NO: 13904 - DNA, 20 bp, Artificial sequence
  Primer
gacgactccgcggagtcgtc

SEQ ID NO: 13905 - DNA, 20 bp, Artificial sequence
  Primer
cacgactccgcggagtcgtg

SEQ ID NO: 13906 - DNA, 20 bp, Artificial sequence
  Primer
tgtgactccgcggagtcaca

SEQ ID NO: 13907 - DNA, 20 bp, Artificial sequence
  Primer
agtgactccgcggagtcact

SEQ ID NO: 13908 - DNA, 20 bp, Artificial sequence
  Primer
ggtgactccgcggagtcacc

SEQ ID NO: 13909 - DNA, 20 bp, Artificial sequence
  Primer
cgtgactccgcggagtcacg

SEQ ID NO: 13910 - DNA, 20 bp, Artificial sequence
  Primer
tgagactccgcggagtctca

SEQ ID NO: 13911 - DNA, 20 bp, Artificial sequence
  Primer
agagactccgcggagtctct

SEQ ID NO: 13912 - DNA, 20 bp, Artificial sequence
  Primer
ggagactccgcggagtctcc

SEQ ID NO: 13913 - DNA, 20 bp, Artificial sequence
  Primer
cgagactccgcggagtctcg

SEQ ID NO: 13914 - DNA, 20 bp, Artificial sequence
  Primer
tgggactccgcggagtccca

SEQ ID NO: 13915 - DNA, 20 bp, Artificial sequence
  Primer
agggactccgcggagtccct

SEQ ID NO: 13916 - DNA, 20 bp, Artificial sequence
  Primer
cgggactccgcggagtcccg

SEQ ID NO: 13917 - DNA, 20 bp, Artificial sequence
  Primer
tgcgactccgcggagtcgca

SEQ ID NO: 13918 - DNA, 20 bp, Artificial sequence
  Primer
agcgactccgcggagtcgct

SEQ ID NO: 13919 - DNA, 20 bp, Artificial sequence
  Primer
ggcgactccgcggagtcgcc

SEQ ID NO: 13920 - DNA, 20 bp, Artificial sequence
  Primer
cgcgactccgcggagtcgcg

SEQ ID NO: 13921 - DNA, 20 bp, Artificial sequence
  Primer
tctgactccgcggagtcaga

SEQ ID NO: 13922 - DNA, 20 bp, Artificial sequence
  Primer
actgactccgcggagtcagt

SEQ ID NO: 13923 - DNA, 20 bp, Artificial sequence
  Primer
gctgactccgcggagtcagc

SEQ ID NO: 13924 - DNA, 20 bp, Artificial sequence
  Primer
cctgactccgcggagtcagg

SEQ ID NO: 13925 - DNA, 20 bp, Artificial sequence
  Primer
tcagactccgcggagtctga

SEQ ID NO: 13926 - DNA, 20 bp, Artificial sequence
  Primer
acagactccgcggagtctgt

SEQ ID NO: 13927 - DNA, 20 bp, Artificial sequence
  Primer
gcagactccgcggagtctgc

SEQ ID NO: 13928 - DNA, 20 bp, Artificial sequence
  Primer
ccagactccgcggagtctgg

SEQ ID NO: 13929 - DNA, 20 bp, Artificial sequence
  Primer
tcggactccgcggagtccga

SEQ ID NO: 13930 - DNA, 20 bp, Artificial sequence
  Primer
acggactccgcggagtccgt

SEQ ID NO: 13931 - DNA, 20 bp, Artificial sequence
  Primer
gcggactccgcggagtccgc

SEQ ID NO: 13932 - DNA, 20 bp, Artificial sequence
  Primer
ccggactccgcggagtccgg

SEQ ID NO: 13933 - DNA, 20 bp, Artificial sequence
  Primer
tccgactccgcggagtcgga

SEQ ID NO: 13934 - DNA, 20 bp, Artificial sequence
  Primer
accgactccgcggagtcggt

SEQ ID NO: 13935 - DNA, 20 bp, Artificial sequence
  Primer
gccgactccgcggagtcggc

SEQ ID NO: 13936 - DNA, 20 bp, Artificial sequence
  Primer
cccgactccgcggagtcggg

SEQ ID NO: 13937 - DNA, 20 bp, Artificial sequence
  Primer
tttgactccgcggagtcaaa

SEQ ID NO: 13938 - DNA, 20 bp, Artificial sequence
  Primer
attgactccgcggagtcaat

SEQ ID NO: 13939 - DNA, 20 bp, Artificial sequence
  Primer
gttgactccgcggagtcaac

SEQ ID NO: 13940 - DNA, 20 bp, Artificial sequence
  Primer
cttgactccgcggagtcaag

SEQ ID NO: 13941 - DNA, 20 bp, Artificial sequence
  Primer
ttagactccgcggagtctaa

SEQ ID NO: 13942 - DNA, 20 bp, Artificial sequence
  Primer
atagactccgcggagtctat

SEQ ID NO: 13943 - DNA, 20 bp, Artificial sequence
  Primer
gtagactccgcggagtctac

SEQ ID NO: 13944 - DNA, 20 bp, Artificial sequence
  Primer
ctagactccgcggagtctag

SEQ ID NO: 13945 - DNA, 20 bp, Artificial sequence
  Primer
ttggactccgcggagtccaa

SEQ ID NO: 13946 - DNA, 20 bp, Artificial sequence
  Primer
atggactccgcggagtccat

SEQ ID NO: 13947 - DNA, 20 bp, Artificial sequence
  Primer
gtggactccgcggagtccac

SEQ ID NO: 13948 - DNA, 20 bp, Artificial sequence
  Primer
ctggactccgcggagtccag

SEQ ID NO: 13949 - DNA, 20 bp, Artificial sequence
  Primer
tatgactcccgggagtcata

SEQ ID NO: 13950 - DNA, 20 bp, Artificial sequence
  Primer
aatgactcccgggagtcatt

SEQ ID NO: 13951 - DNA, 20 bp, Artificial sequence
  Primer
gatgactcccgggagtcatc

SEQ ID NO: 13952 - DNA, 20 bp, Artificial sequence
  Primer
taagactcccgggagtctta

SEQ ID NO: 13953 - DNA, 20 bp, Artificial sequence
  Primer
aaagactcccgggagtcttt

SEQ ID NO: 13954 - DNA, 20 bp, Artificial sequence
  Primer
gaagactcccgggagtcttc

SEQ ID NO: 13955 - DNA, 20 bp, Artificial sequence
  Primer
caagactcccgggagtcttg

SEQ ID NO: 13956 - DNA, 20 bp, Artificial sequence
  Primer
taggactcccgggagtccta

SEQ ID NO: 13957 - DNA, 20 bp, Artificial sequence
  Primer
aaggactcccgggagtcctt

SEQ ID NO: 13958 - DNA, 20 bp, Artificial sequence
  Primer
gaggactcccgggagtcctc

SEQ ID NO: 13959 - DNA, 20 bp, Artificial sequence
  Primer
caggactcccgggagtcctg

SEQ ID NO: 13960 - DNA, 20 bp, Artificial sequence
  Primer
tacgactcccgggagtcgta

SEQ ID NO: 13961 - DNA, 20 bp, Artificial sequence
  Primer
aacgactcccgggagtcgtt

SEQ ID NO: 13962 - DNA, 20 bp, Artificial sequence
  Primer
gacgactcccgggagtcgtc

SEQ ID NO: 13963 - DNA, 20 bp, Artificial sequence
  Primer
cacgactcccgggagtcgtg

SEQ ID NO: 13964 - DNA, 20 bp, Artificial sequence
  Primer
tgtgactcccgggagtcaca

SEQ ID NO: 13965 - DNA, 20 bp, Artificial sequence
  Primer
agtgactcccgggagtcact

SEQ ID NO: 13966 - DNA, 20 bp, Artificial sequence
  Primer
ggtgactcccgggagtcacc

SEQ ID NO: 13967 - DNA, 20 bp, Artificial sequence
  Primer
cgtgactcccgggagtcacg

SEQ ID NO: 13968 - DNA, 20 bp, Artificial sequence
  Primer
tgagactcccgggagtctca

SEQ ID NO: 13969 - DNA, 20 bp, Artificial sequence
  Primer
agagactcccgggagtctct

SEQ ID NO: 13970 - DNA, 20 bp, Artificial sequence
  Primer
ggagactcccgggagtctcc

SEQ ID NO: 13971 - DNA, 20 bp, Artificial sequence
  Primer
cgagactcccgggagtctcg

SEQ ID NO: 13972 - DNA, 20 bp, Artificial sequence
  Primer
tgggactcccgggagtccca

SEQ ID NO: 13973 - DNA, 20 bp, Artificial sequence
  Primer
agggactcccgggagtccct

SEQ ID NO: 13974 - DNA, 20 bp, Artificial sequence
  Primer
cgggactcccgggagtcccg

SEQ ID NO: 13975 - DNA, 20 bp, Artificial sequence
  Primer
tgcgactcccgggagtcgca

SEQ ID NO: 13976 - DNA, 20 bp, Artificial sequence
  Primer
agcgactcccgggagtcgct

SEQ ID NO: 13977 - DNA, 20 bp, Artificial sequence
  Primer
ggcgactcccgggagtcgcc

SEQ ID NO: 13978 - DNA, 20 bp, Artificial sequence
  Primer
cgcgactcccgggagtcgcg

SEQ ID NO: 13979 - DNA, 20 bp, Artificial sequence
  Primer
tctgactcccgggagtcaga

SEQ ID NO: 13980 - DNA, 20 bp, Artificial sequence
  Primer
actgactcccgggagtcagt

SEQ ID NO: 13981 - DNA, 20 bp, Artificial sequence
  Primer
gctgactcccgggagtcagc

SEQ ID NO: 13982 - DNA, 20 bp, Artificial sequence
  Primer
cctgactcccgggagtcagg

SEQ ID NO: 13983 - DNA, 20 bp, Artificial sequence
  Primer
tcagactcccgggagtctga

SEQ ID NO: 13984 - DNA, 20 bp, Artificial sequence
  Primer
acagactcccgggagtctgt

SEQ ID NO: 13985 - DNA, 20 bp, Artificial sequence
  Primer
gcagactcccgggagtctgc

SEQ ID NO: 13986 - DNA, 20 bp, Artificial sequence
  Primer
ccagactcccgggagtctgg

SEQ ID NO: 13987 - DNA, 20 bp, Artificial sequence
  Primer
tcggactcccgggagtccga

SEQ ID NO: 13988 - DNA, 20 bp, Artificial sequence
  Primer
acggactcccgggagtccgt

SEQ ID NO: 13989 - DNA, 20 bp, Artificial sequence
  Primer
gcggactcccgggagtccgc

SEQ ID NO: 13990 - DNA, 20 bp, Artificial sequence
  Primer
ccggactcccgggagtccgg

SEQ ID NO: 13991 - DNA, 20 bp, Artificial sequence
  Primer
tccgactcccgggagtcgga

SEQ ID NO: 13992 - DNA, 20 bp, Artificial sequence
  Primer
accgactcccgggagtcggt

SEQ ID NO: 13993 - DNA, 20 bp, Artificial sequence
  Primer
gccgactcccgggagtcggc

SEQ ID NO: 13994 - DNA, 20 bp, Artificial sequence
  Primer
cccgactcccgggagtcggg

SEQ ID NO: 13995 - DNA, 20 bp, Artificial sequence
  Primer
tttgactcccgggagtcaaa

SEQ ID NO: 13996 - DNA, 20 bp, Artificial sequence
  Primer
attgactcccgggagtcaat

SEQ ID NO: 13997 - DNA, 20 bp, Artificial sequence
  Primer
gttgactcccgggagtcaac

SEQ ID NO: 13998 - DNA, 20 bp, Artificial sequence
  Primer
cttgactcccgggagtcaag

SEQ ID NO: 13999 - DNA, 20 bp, Artificial sequence
  Primer
ttagactcccgggagtctaa

SEQ ID NO: 14000 - DNA, 20 bp, Artificial sequence
  Primer
atagactcccgggagtctat

SEQ ID NO: 14001 - DNA, 20 bp, Artificial sequence
  Primer
gtagactcccgggagtctac

SEQ ID NO: 14002 - DNA, 20 bp, Artificial sequence
  Primer
ctagactcccgggagtctag

SEQ ID NO: 14003 - DNA, 20 bp, Artificial sequence
  Primer
ttggactcccgggagtccaa

SEQ ID NO: 14004 - DNA, 20 bp, Artificial sequence
  Primer
atggactcccgggagtccat

SEQ ID NO: 14005 - DNA, 20 bp, Artificial sequence
  Primer
gtggactcccgggagtccac

SEQ ID NO: 14006 - DNA, 20 bp, Artificial sequence
  Primer
ctggactcccgggagtccag

SEQ ID NO: 14007 - DNA, 20 bp, Artificial sequence
  Primer
tatgactcggccgagtcata

SEQ ID NO: 14008 - DNA, 20 bp, Artificial sequence
  Primer
aatgactcggccgagtcatt

SEQ ID NO: 14009 - DNA, 20 bp, Artificial sequence
  Primer
gatgactcggccgagtcatc

SEQ ID NO: 14010 - DNA, 20 bp, Artificial sequence
  Primer
taagactcggccgagtctta

SEQ ID NO: 14011 - DNA, 20 bp, Artificial sequence
  Primer
aaagactcggccgagtcttt

SEQ ID NO: 14012 - DNA, 20 bp, Artificial sequence
  Primer
gaagactcggccgagtcttc

SEQ ID NO: 14013 - DNA, 20 bp, Artificial sequence
  Primer
caagactcggccgagtcttg

SEQ ID NO: 14014 - DNA, 20 bp, Artificial sequence
  Primer
taggactcggccgagtccta

SEQ ID NO: 14015 - DNA, 20 bp, Artificial sequence
  Primer
aaggactcggccgagtcctt

SEQ ID NO: 14016 - DNA, 20 bp, Artificial sequence
  Primer
gaggactcggccgagtcctc

SEQ ID NO: 14017 - DNA, 20 bp, Artificial sequence
  Primer
caggactcggccgagtcctg

SEQ ID NO: 14018 - DNA, 20 bp, Artificial sequence
  Primer
tacgactcggccgagtcgta

SEQ ID NO: 14019 - DNA, 20 bp, Artificial sequence
  Primer
aacgactcggccgagtcgtt

SEQ ID NO: 14020 - DNA, 20 bp, Artificial sequence
  Primer
gacgactcggccgagtcgtc

SEQ ID NO: 14021 - DNA, 20 bp, Artificial sequence
  Primer
cacgactcggccgagtcgtg

SEQ ID NO: 14022 - DNA, 20 bp, Artificial sequence
  Primer
tgtgactcggccgagtcaca

SEQ ID NO: 14023 - DNA, 20 bp, Artificial sequence
  Primer
agtgactcggccgagtcact

SEQ ID NO: 14024 - DNA, 20 bp, Artificial sequence
  Primer
ggtgactcggccgagtcacc

SEQ ID NO: 14025 - DNA, 20 bp, Artificial sequence
  Primer
cgtgactcggccgagtcacg

SEQ ID NO: 14026 - DNA, 20 bp, Artificial sequence
  Primer
tgagactcggccgagtctca

SEQ ID NO: 14027 - DNA, 20 bp, Artificial sequence
  Primer
agagactcggccgagtctct

SEQ ID NO: 14028 - DNA, 20 bp, Artificial sequence
  Primer
ggagactcggccgagtctcc

SEQ ID NO: 14029 - DNA, 20 bp, Artificial sequence
  Primer
cgagactcggccgagtctcg

SEQ ID NO: 14030 - DNA, 20 bp, Artificial sequence
  Primer
tgggactcggccgagtccca

SEQ ID NO: 14031 - DNA, 20 bp, Artificial sequence
  Primer
agggactcggccgagtccct

SEQ ID NO: 14032 - DNA, 20 bp, Artificial sequence
  Primer
cgggactcggccgagtcccg

SEQ ID NO: 14033 - DNA, 20 bp, Artificial sequence
  Primer
tgcgactcggccgagtcgca

SEQ ID NO: 14034 - DNA, 20 bp, Artificial sequence
  Primer
agcgactcggccgagtcgct

SEQ ID NO: 14035 - DNA, 20 bp, Artificial sequence
  Primer
ggcgactcggccgagtcgcc

SEQ ID NO: 14036 - DNA, 20 bp, Artificial sequence
  Primer
cgcgactcggccgagtcgcg

SEQ ID NO: 14037 - DNA, 20 bp, Artificial sequence
  Primer
tctgactcggccgagtcaga

SEQ ID NO: 14038 - DNA, 20 bp, Artificial sequence
  Primer
actgactcggccgagtcagt

SEQ ID NO: 14039 - DNA, 20 bp, Artificial sequence
  Primer
gctgactcggccgagtcagc

SEQ ID NO: 14040 - DNA, 20 bp, Artificial sequence
  Primer
cctgactcggccgagtcagg

SEQ ID NO: 14041 - DNA, 20 bp, Artificial sequence
  Primer
tcagactcggccgagtctga

SEQ ID NO: 14042 - DNA, 20 bp, Artificial sequence
  Primer
acagactcggccgagtctgt

SEQ ID NO: 14043 - DNA, 20 bp, Artificial sequence
  Primer
gcagactcggccgagtctgc

SEQ ID NO: 14044 - DNA, 20 bp, Artificial sequence
  Primer
ccagactcggccgagtctgg

SEQ ID NO: 14045 - DNA, 20 bp, Artificial sequence
  Primer
tcggactcggccgagtccga

SEQ ID NO: 14046 - DNA, 20 bp, Artificial sequence
  Primer
acggactcggccgagtccgt

SEQ ID NO: 14047 - DNA, 20 bp, Artificial sequence
  Primer
gcggactcggccgagtccgc

SEQ ID NO: 14048 - DNA, 20 bp, Artificial sequence
  Primer
ccggactcggccgagtccgg

SEQ ID NO: 14049 - DNA, 20 bp, Artificial sequence
  Primer
tccgactcggccgagtcgga

SEQ ID NO: 14050 - DNA, 20 bp, Artificial sequence
  Primer
accgactcggccgagtcggt

SEQ ID NO: 14051 - DNA, 20 bp, Artificial sequence
  Primer
gccgactcggccgagtcggc

SEQ ID NO: 14052 - DNA, 20 bp, Artificial sequence
  Primer
cccgactcggccgagtcggg

SEQ ID NO: 14053 - DNA, 20 bp, Artificial sequence
  Primer
tttgactcggccgagtcaaa

SEQ ID NO: 14054 - DNA, 20 bp, Artificial sequence
  Primer
attgactcggccgagtcaat

SEQ ID NO: 14055 - DNA, 20 bp, Artificial sequence
  Primer
gttgactcggccgagtcaac

SEQ ID NO: 14056 - DNA, 20 bp, Artificial sequence
  Primer
cttgactcggccgagtcaag

SEQ ID NO: 14057 - DNA, 20 bp, Artificial sequence
  Primer
ttagactcggccgagtctaa

SEQ ID NO: 14058 - DNA, 20 bp, Artificial sequence
  Primer
atagactcggccgagtctat

SEQ ID NO: 14059 - DNA, 20 bp, Artificial sequence
  Primer
gtagactcggccgagtctac

SEQ ID NO: 14060 - DNA, 20 bp, Artificial sequence
  Primer
ctagactcggccgagtctag

SEQ ID NO: 14061 - DNA, 20 bp, Artificial sequence
  Primer
ttggactcggccgagtccaa

SEQ ID NO: 14062 - DNA, 20 bp, Artificial sequence
  Primer
atggactcggccgagtccat

SEQ ID NO: 14063 - DNA, 20 bp, Artificial sequence
  Primer
gtggactcggccgagtccac

SEQ ID NO: 14064 - DNA, 20 bp, Artificial sequence
  Primer
ctggactcggccgagtccag

SEQ ID NO: 14065 - DNA, 20 bp, Artificial sequence
  Primer
aatgactctgcagagtcatt

SEQ ID NO: 14066 - DNA, 20 bp, Artificial sequence
  Primer
gatgactctgcagagtcatc

SEQ ID NO: 14067 - DNA, 20 bp, Artificial sequence
  Primer
aaagactctgcagagtcttt

SEQ ID NO: 14068 - DNA, 20 bp, Artificial sequence
  Primer
gaagactctgcagagtcttc

SEQ ID NO: 14069 - DNA, 20 bp, Artificial sequence
  Primer
caagactctgcagagtcttg

SEQ ID NO: 14070 - DNA, 20 bp, Artificial sequence
  Primer
taggactctgcagagtccta

SEQ ID NO: 14071 - DNA, 20 bp, Artificial sequence
  Primer
aaggactctgcagagtcctt

SEQ ID NO: 14072 - DNA, 20 bp, Artificial sequence
  Primer
gaggactctgcagagtcctc

SEQ ID NO: 14073 - DNA, 20 bp, Artificial sequence
  Primer
caggactctgcagagtcctg

SEQ ID NO: 14074 - DNA, 20 bp, Artificial sequence
  Primer
tacgactctgcagagtcgta

SEQ ID NO: 14075 - DNA, 20 bp, Artificial sequence
  Primer
aacgactctgcagagtcgtt

SEQ ID NO: 14076 - DNA, 20 bp, Artificial sequence
  Primer
gacgactctgcagagtcgtc

SEQ ID NO: 14077 - DNA, 20 bp, Artificial sequence
  Primer
cacgactctgcagagtcgtg

SEQ ID NO: 14078 - DNA, 20 bp, Artificial sequence
  Primer
tgtgactctgcagagtcaca

SEQ ID NO: 14079 - DNA, 20 bp, Artificial sequence
  Primer
agtgactctgcagagtcact

SEQ ID NO: 14080 - DNA, 20 bp, Artificial sequence
  Primer
ggtgactctgcagagtcacc

SEQ ID NO: 14081 - DNA, 20 bp, Artificial sequence
  Primer
cgtgactctgcagagtcacg

SEQ ID NO: 14082 - DNA, 20 bp, Artificial sequence
  Primer
tgagactctgcagagtctca

SEQ ID NO: 14083 - DNA, 20 bp, Artificial sequence
  Primer
agagactctgcagagtctct

SEQ ID NO: 14084 - DNA, 20 bp, Artificial sequence
  Primer
ggagactctgcagagtctcc

SEQ ID NO: 14085 - DNA, 20 bp, Artificial sequence
  Primer
cgagactctgcagagtctcg

SEQ ID NO: 14086 - DNA, 20 bp, Artificial sequence
  Primer
tgggactctgcagagtccca

SEQ ID NO: 14087 - DNA, 20 bp, Artificial sequence
  Primer
agggactctgcagagtccct

SEQ ID NO: 14088 - DNA, 20 bp, Artificial sequence
  Primer
cgggactctgcagagtcccg

SEQ ID NO: 14089 - DNA, 20 bp, Artificial sequence
  Primer
tgcgactctgcagagtcgca

SEQ ID NO: 14090 - DNA, 20 bp, Artificial sequence
  Primer
agcgactctgcagagtcgct

SEQ ID NO: 14091 - DNA, 20 bp, Artificial sequence
  Primer
ggcgactctgcagagtcgcc

SEQ ID NO: 14092 - DNA, 20 bp, Artificial sequence
  Primer
cgcgactctgcagagtcgcg

SEQ ID NO: 14093 - DNA, 20 bp, Artificial sequence
  Primer
tctgactctgcagagtcaga

SEQ ID NO: 14094 - DNA, 20 bp, Artificial sequence
  Primer
actgactctgcagagtcagt

SEQ ID NO: 14095 - DNA, 20 bp, Artificial sequence
  Primer
gctgactctgcagagtcagc

SEQ ID NO: 14096 - DNA, 20 bp, Artificial sequence
  Primer
cctgactctgcagagtcagg

SEQ ID NO: 14097 - DNA, 20 bp, Artificial sequence
  Primer
tcagactctgcagagtctga

SEQ ID NO: 14098 - DNA, 20 bp, Artificial sequence
  Primer
acagactctgcagagtctgt

SEQ ID NO: 14099 - DNA, 20 bp, Artificial sequence
  Primer
gcagactctgcagagtctgc

SEQ ID NO: 14100 - DNA, 20 bp, Artificial sequence
  Primer
ccagactctgcagagtctgg

SEQ ID NO: 14101 - DNA, 20 bp, Artificial sequence
  Primer
tcggactctgcagagtccga

SEQ ID NO: 14102 - DNA, 20 bp, Artificial sequence
  Primer
acggactctgcagagtccgt

SEQ ID NO: 14103 - DNA, 20 bp, Artificial sequence
  Primer
gcggactctgcagagtccgc

SEQ ID NO: 14104 - DNA, 20 bp, Artificial sequence
  Primer
ccggactctgcagagtccgg

SEQ ID NO: 14105 - DNA, 20 bp, Artificial sequence
  Primer
tccgactctgcagagtcgga

SEQ ID NO: 14106 - DNA, 20 bp, Artificial sequence
  Primer
accgactctgcagagtcggt

SEQ ID NO: 14107 - DNA, 20 bp, Artificial sequence
  Primer
gccgactctgcagagtcggc

SEQ ID NO: 14108 - DNA, 20 bp, Artificial sequence
  Primer
cccgactctgcagagtcggg

SEQ ID NO: 14109 - DNA, 20 bp, Artificial sequence
  Primer
tttgactctgcagagtcaaa

SEQ ID NO: 14110 - DNA, 20 bp, Artificial sequence
  Primer
attgactctgcagagtcaat

SEQ ID NO: 14111 - DNA, 20 bp, Artificial sequence
  Primer
gttgactctgcagagtcaac

SEQ ID NO: 14112 - DNA, 20 bp, Artificial sequence
  Primer
cttgactctgcagagtcaag

SEQ ID NO: 14113 - DNA, 20 bp, Artificial sequence
  Primer
gtagactctgcagagtctac

SEQ ID NO: 14114 - DNA, 20 bp, Artificial sequence
  Primer
ctagactctgcagagtctag

SEQ ID NO: 14115 - DNA, 20 bp, Artificial sequence
  Primer
ttggactctgcagagtccaa

SEQ ID NO: 14116 - DNA, 20 bp, Artificial sequence
  Primer
atggactctgcagagtccat

SEQ ID NO: 14117 - DNA, 20 bp, Artificial sequence
  Primer
gtggactctgcagagtccac

SEQ ID NO: 14118 - DNA, 20 bp, Artificial sequence
  Primer
ctggactctgcagagtccag

SEQ ID NO: 14119 - DNA, 20 bp, Artificial sequence
  Primer
taggactcagctgagtccta

SEQ ID NO: 14120 - DNA, 20 bp, Artificial sequence
  Primer
tgtgactcagctgagtcaca

SEQ ID NO: 14121 - DNA, 20 bp, Artificial sequence
  Primer
tgagactcagctgagtctca

SEQ ID NO: 14122 - DNA, 20 bp, Artificial sequence
  Primer
tgggactcagctgagtccca

SEQ ID NO: 14123 - DNA, 20 bp, Artificial sequence
  Primer
tgcgactcagctgagtcgca

SEQ ID NO: 14124 - DNA, 20 bp, Artificial sequence
  Primer
tctgactcagctgagtcaga

SEQ ID NO: 14125 - DNA, 20 bp, Artificial sequence
  Primer
tcagactcagctgagtctga

SEQ ID NO: 14126 - DNA, 20 bp, Artificial sequence
  Primer
tcggactcagctgagtccga

SEQ ID NO: 14127 - DNA, 20 bp, Artificial sequence
  Primer
tccgactcagctgagtcgga

SEQ ID NO: 14128 - DNA, 20 bp, Artificial sequence
  Primer
tttgactcagctgagtcaaa

SEQ ID NO: 14129 - DNA, 20 bp, Artificial sequence
  Primer
ttggactcagctgagtccaa

SEQ ID NO: 14130 - DNA, 20 bp, Artificial sequence
  Primer
taggactctcgagagtccta

SEQ ID NO: 14131 - DNA, 20 bp, Artificial sequence
  Primer
tacgactctcgagagtcgta

SEQ ID NO: 14132 - DNA, 20 bp, Artificial sequence
  Primer
tgtgactctcgagagtcaca

SEQ ID NO: 14133 - DNA, 20 bp, Artificial sequence
  Primer
tgagactctcgagagtctca

SEQ ID NO: 14134 - DNA, 20 bp, Artificial sequence
  Primer
tgggactctcgagagtccca

SEQ ID NO: 14135 - DNA, 20 bp, Artificial sequence
  Primer
tgcgactctcgagagtcgca

SEQ ID NO: 14136 - DNA, 20 bp, Artificial sequence
  Primer
tctgactctcgagagtcaga

SEQ ID NO: 14137 - DNA, 20 bp, Artificial sequence
  Primer
tcagactctcgagagtctga

SEQ ID NO: 14138 - DNA, 20 bp, Artificial sequence
  Primer
tcggactctcgagagtccga

SEQ ID NO: 14139 - DNA, 20 bp, Artificial sequence
  Primer
tttgactctcgagagtcaaa

SEQ ID NO: 14140 - DNA, 20 bp, Artificial sequence
  Primer
ttggactctcgagagtccaa

SEQ ID NO: 14141 - DNA, 20 bp, Artificial sequence
  Primer
tatgactcacgtgagtcata

SEQ ID NO: 14142 - DNA, 20 bp, Artificial sequence
  Primer
taggactcacgtgagtccta

SEQ ID NO: 14143 - DNA, 20 bp, Artificial sequence
  Primer
tacgactcacgtgagtcgta

SEQ ID NO: 14144 - DNA, 20 bp, Artificial sequence
  Primer
tgtgactcacgtgagtcaca

SEQ ID NO: 14145 - DNA, 20 bp, Artificial sequence
  Primer
tgagactcacgtgagtctca

SEQ ID NO: 14146 - DNA, 20 bp, Artificial sequence
  Primer
tgggactcacgtgagtccca

SEQ ID NO: 14147 - DNA, 20 bp, Artificial sequence
  Primer
tgcgactcacgtgagtcgca

SEQ ID NO: 14148 - DNA, 20 bp, Artificial sequence
  Primer
tctgactcacgtgagtcaga

SEQ ID NO: 14149 - DNA, 20 bp, Artificial sequence
  Primer
tcagactcacgtgagtctga

SEQ ID NO: 14150 - DNA, 20 bp, Artificial sequence
  Primer
tcggactcacgtgagtccga

SEQ ID NO: 14151 - DNA, 20 bp, Artificial sequence
  Primer
tccgactcacgtgagtcgga

SEQ ID NO: 14152 - DNA, 20 bp, Artificial sequence
  Primer
tttgactcacgtgagtcaaa

SEQ ID NO: 14153 - DNA, 20 bp, Artificial sequence
  Primer
ttggactcacgtgagtccaa

SEQ ID NO: 14154 - DNA, 20 bp, Artificial sequence
  Primer
taggactccatggagtccta

SEQ ID NO: 14155 - DNA, 20 bp, Artificial sequence
  Primer
tacgactccatggagtcgta

SEQ ID NO: 14156 - DNA, 20 bp, Artificial sequence
  Primer
tgtgactccatggagtcaca

SEQ ID NO: 14157 - DNA, 20 bp, Artificial sequence
  Primer
tgagactccatggagtctca

SEQ ID NO: 14158 - DNA, 20 bp, Artificial sequence
  Primer
tgggactccatggagtccca

SEQ ID NO: 14159 - DNA, 20 bp, Artificial sequence
  Primer
tgcgactccatggagtcgca

SEQ ID NO: 14160 - DNA, 20 bp, Artificial sequence
  Primer
tctgactccatggagtcaga

SEQ ID NO: 14161 - DNA, 20 bp, Artificial sequence
  Primer
tcagactccatggagtctga

SEQ ID NO: 14162 - DNA, 20 bp, Artificial sequence
  Primer
tcggactccatggagtccga

SEQ ID NO: 14163 - DNA, 20 bp, Artificial sequence
  Primer
tccgactccatggagtcgga

SEQ ID NO: 14164 - DNA, 20 bp, Artificial sequence
  Primer
tttgactccatggagtcaaa

SEQ ID NO: 14165 - DNA, 20 bp, Artificial sequence
  Primer
ttggactccatggagtccaa

SEQ ID NO: 14166 - DNA, 20 bp, Artificial sequence
  Primer
taggactcgtacgagtccta

SEQ ID NO: 14167 - DNA, 20 bp, Artificial sequence
  Primer
tacgactcgtacgagtcgta

SEQ ID NO: 14168 - DNA, 20 bp, Artificial sequence
  Primer
tgtgactcgtacgagtcaca

SEQ ID NO: 14169 - DNA, 20 bp, Artificial sequence
  Primer
tgagactcgtacgagtctca

SEQ ID NO: 14170 - DNA, 20 bp, Artificial sequence
  Primer
tgggactcgtacgagtccca

SEQ ID NO: 14171 - DNA, 20 bp, Artificial sequence
  Primer
tgcgactcgtacgagtcgca

SEQ ID NO: 14172 - DNA, 20 bp, Artificial sequence
  Primer
tctgactcgtacgagtcaga

SEQ ID NO: 14173 - DNA, 20 bp, Artificial sequence
  Primer
tcagactcgtacgagtctga

SEQ ID NO: 14174 - DNA, 20 bp, Artificial sequence
  Primer
tcggactcgtacgagtccga

SEQ ID NO: 14175 - DNA, 20 bp, Artificial sequence
  Primer
tccgactcgtacgagtcgga

SEQ ID NO: 14176 - DNA, 20 bp, Artificial sequence
  Primer
tttgactcgtacgagtcaaa

SEQ ID NO: 14177 - DNA, 20 bp, Artificial sequence
  Primer
ttggactcgtacgagtccaa

SEQ ID NO: 14178 - DNA, 20 bp, Artificial sequence
  Primer
taggactcctaggagtccta

SEQ ID NO: 14179 - DNA, 20 bp, Artificial sequence
  Primer
tacgactcctaggagtcgta

SEQ ID NO: 14180 - DNA, 20 bp, Artificial sequence
  Primer
tgtgactcctaggagtcaca

SEQ ID NO: 14181 - DNA, 20 bp, Artificial sequence
  Primer
tgagactcctaggagtctca

SEQ ID NO: 14182 - DNA, 20 bp, Artificial sequence
  Primer
tgggactcctaggagtccca

SEQ ID NO: 14183 - DNA, 20 bp, Artificial sequence
  Primer
tgcgactcctaggagtcgca

SEQ ID NO: 14184 - DNA, 20 bp, Artificial sequence
  Primer
tctgactcctaggagtcaga

SEQ ID NO: 14185 - DNA, 20 bp, Artificial sequence
  Primer
tcagactcctaggagtctga

SEQ ID NO: 14186 - DNA, 20 bp, Artificial sequence
  Primer
tcggactcctaggagtccga

SEQ ID NO: 14187 - DNA, 20 bp, Artificial sequence
  Primer
tccgactcctaggagtcgga

SEQ ID NO: 14188 - DNA, 20 bp, Artificial sequence
  Primer
tttgactcctaggagtcaaa

SEQ ID NO: 14189 - DNA, 20 bp, Artificial sequence
  Primer
ttggactcctaggagtccaa

SEQ ID NO: 14190 - DNA, 20 bp, Artificial sequence
  Primer
aatgactcagctgagtcatt

SEQ ID NO: 14191 - DNA, 20 bp, Artificial sequence
  Primer
aaagactcagctgagtcttt

SEQ ID NO: 14192 - DNA, 20 bp, Artificial sequence
  Primer
aaggactcagctgagtcctt

SEQ ID NO: 14193 - DNA, 20 bp, Artificial sequence
  Primer
agtgactcagctgagtcact

SEQ ID NO: 14194 - DNA, 20 bp, Artificial sequence
  Primer
agagactcagctgagtctct

SEQ ID NO: 14195 - DNA, 20 bp, Artificial sequence
  Primer
agggactcagctgagtccct

SEQ ID NO: 14196 - DNA, 20 bp, Artificial sequence
  Primer
agcgactcagctgagtcgct

SEQ ID NO: 14197 - DNA, 20 bp, Artificial sequence
  Primer
actgactcagctgagtcagt

SEQ ID NO: 14198 - DNA, 20 bp, Artificial sequence
  Primer
acagactcagctgagtctgt

SEQ ID NO: 14199 - DNA, 20 bp, Artificial sequence
  Primer
acggactcagctgagtccgt

SEQ ID NO: 14200 - DNA, 20 bp, Artificial sequence
  Primer
accgactcagctgagtcggt

SEQ ID NO: 14201 - DNA, 20 bp, Artificial sequence
  Primer
attgactcagctgagtcaat

SEQ ID NO: 14202 - DNA, 20 bp, Artificial sequence
  Primer
atggactcagctgagtccat

SEQ ID NO: 14203 - DNA, 20 bp, Artificial sequence
  Primer
aatgactctcgagagtcatt

SEQ ID NO: 14204 - DNA, 20 bp, Artificial sequence
  Primer
aaagactctcgagagtcttt

SEQ ID NO: 14205 - DNA, 20 bp, Artificial sequence
  Primer
aaggactctcgagagtcctt

SEQ ID NO: 14206 - DNA, 20 bp, Artificial sequence
  Primer
aacgactctcgagagtcgtt

SEQ ID NO: 14207 - DNA, 20 bp, Artificial sequence
  Primer
agtgactctcgagagtcact

SEQ ID NO: 14208 - DNA, 20 bp, Artificial sequence
  Primer
agagactctcgagagtctct

SEQ ID NO: 14209 - DNA, 20 bp, Artificial sequence
  Primer
agggactctcgagagtccct

SEQ ID NO: 14210 - DNA, 20 bp, Artificial sequence
  Primer
agcgactctcgagagtcgct

SEQ ID NO: 14211 - DNA, 20 bp, Artificial sequence
  Primer
actgactctcgagagtcagt

SEQ ID NO: 14212 - DNA, 20 bp, Artificial sequence
  Primer
acagactctcgagagtctgt

SEQ ID NO: 14213 - DNA, 20 bp, Artificial sequence
  Primer
acggactctcgagagtccgt

SEQ ID NO: 14214 - DNA, 20 bp, Artificial sequence
  Primer
attgactctcgagagtcaat

SEQ ID NO: 14215 - DNA, 20 bp, Artificial sequence
  Primer
atggactctcgagagtccat

SEQ ID NO: 14216 - DNA, 20 bp, Artificial sequence
  Primer
aatgactcacgtgagtcatt

SEQ ID NO: 14217 - DNA, 20 bp, Artificial sequence
  Primer
aaagactcacgtgagtcttt

SEQ ID NO: 14218 - DNA, 20 bp, Artificial sequence
  Primer
aaggactcacgtgagtcctt

SEQ ID NO: 14219 - DNA, 20 bp, Artificial sequence
  Primer
aacgactcacgtgagtcgtt

SEQ ID NO: 14220 - DNA, 20 bp, Artificial sequence
  Primer
agtgactcacgtgagtcact

SEQ ID NO: 14221 - DNA, 20 bp, Artificial sequence
  Primer
agagactcacgtgagtctct

SEQ ID NO: 14222 - DNA, 20 bp, Artificial sequence
  Primer
agggactcacgtgagtccct

SEQ ID NO: 14223 - DNA, 20 bp, Artificial sequence
  Primer
agcgactcacgtgagtcgct

SEQ ID NO: 14224 - DNA, 20 bp, Artificial sequence
  Primer
actgactcacgtgagtcagt

SEQ ID NO: 14225 - DNA, 20 bp, Artificial sequence
  Primer
acagactcacgtgagtctgt

SEQ ID NO: 14226 - DNA, 20 bp, Artificial sequence
  Primer
acggactcacgtgagtccgt

SEQ ID NO: 14227 - DNA, 20 bp, Artificial sequence
  Primer
accgactcacgtgagtcggt

SEQ ID NO: 14228 - DNA, 20 bp, Artificial sequence
  Primer
attgactcacgtgagtcaat

SEQ ID NO: 14229 - DNA, 20 bp, Artificial sequence
  Primer
atggactcacgtgagtccat

SEQ ID NO: 14230 - DNA, 20 bp, Artificial sequence
  Primer
aatgactccatggagtcatt

SEQ ID NO: 14231 - DNA, 20 bp, Artificial sequence
  Primer
aaagactccatggagtcttt

SEQ ID NO: 14232 - DNA, 20 bp, Artificial sequence
  Primer
aaggactccatggagtcctt

SEQ ID NO: 14233 - DNA, 20 bp, Artificial sequence
  Primer
aacgactccatggagtcgtt

SEQ ID NO: 14234 - DNA, 20 bp, Artificial sequence
  Primer
agtgactccatggagtcact

SEQ ID NO: 14235 - DNA, 20 bp, Artificial sequence
  Primer
agagactccatggagtctct

SEQ ID NO: 14236 - DNA, 20 bp, Artificial sequence
  Primer
agggactccatggagtccct

SEQ ID NO: 14237 - DNA, 20 bp, Artificial sequence
  Primer
agcgactccatggagtcgct

SEQ ID NO: 14238 - DNA, 20 bp, Artificial sequence
  Primer
actgactccatggagtcagt

SEQ ID NO: 14239 - DNA, 20 bp, Artificial sequence
  Primer
acagactccatggagtctgt

SEQ ID NO: 14240 - DNA, 20 bp, Artificial sequence
  Primer
acggactccatggagtccgt

SEQ ID NO: 14241 - DNA, 20 bp, Artificial sequence
  Primer
accgactccatggagtcggt

SEQ ID NO: 14242 - DNA, 20 bp, Artificial sequence
  Primer
attgactccatggagtcaat

SEQ ID NO: 14243 - DNA, 20 bp, Artificial sequence
  Primer
atggactccatggagtccat

SEQ ID NO: 14244 - DNA, 20 bp, Artificial sequence
  Primer
aatgactcgtacgagtcatt

SEQ ID NO: 14245 - DNA, 20 bp, Artificial sequence
  Primer
aaagactcgtacgagtcttt

SEQ ID NO: 14246 - DNA, 20 bp, Artificial sequence
  Primer
aaggactcgtacgagtcctt

SEQ ID NO: 14247 - DNA, 20 bp, Artificial sequence
  Primer
aacgactcgtacgagtcgtt

SEQ ID NO: 14248 - DNA, 20 bp, Artificial sequence
  Primer
agtgactcgtacgagtcact

SEQ ID NO: 14249 - DNA, 20 bp, Artificial sequence
  Primer
agagactcgtacgagtctct

SEQ ID NO: 14250 - DNA, 20 bp, Artificial sequence
  Primer
agggactcgtacgagtccct

SEQ ID NO: 14251 - DNA, 20 bp, Artificial sequence
  Primer
agcgactcgtacgagtcgct

SEQ ID NO: 14252 - DNA, 20 bp, Artificial sequence
  Primer
actgactcgtacgagtcagt

SEQ ID NO: 14253 - DNA, 20 bp, Artificial sequence
  Primer
acagactcgtacgagtctgt

SEQ ID NO: 14254 - DNA, 20 bp, Artificial sequence
  Primer
acggactcgtacgagtccgt

SEQ ID NO: 14255 - DNA, 20 bp, Artificial sequence
  Primer
accgactcgtacgagtcggt

SEQ ID NO: 14256 - DNA, 20 bp, Artificial sequence
  Primer
attgactcgtacgagtcaat

SEQ ID NO: 14257 - DNA, 20 bp, Artificial sequence
  Primer
atggactcgtacgagtccat

SEQ ID NO: 14258 - DNA, 20 bp, Artificial sequence
  Primer
aaggactcctaggagtcctt

SEQ ID NO: 14259 - DNA, 20 bp, Artificial sequence
  Primer
aacgactcctaggagtcgtt

SEQ ID NO: 14260 - DNA, 20 bp, Artificial sequence
  Primer
agtgactcctaggagtcact

SEQ ID NO: 14261 - DNA, 20 bp, Artificial sequence
  Primer
agagactcctaggagtctct

SEQ ID NO: 14262 - DNA, 20 bp, Artificial sequence
  Primer
agggactcctaggagtccct

SEQ ID NO: 14263 - DNA, 20 bp, Artificial sequence
  Primer
agcgactcctaggagtcgct

SEQ ID NO: 14264 - DNA, 20 bp, Artificial sequence
  Primer
actgactcctaggagtcagt

SEQ ID NO: 14265 - DNA, 20 bp, Artificial sequence
  Primer
acagactcctaggagtctgt

SEQ ID NO: 14266 - DNA, 20 bp, Artificial sequence
  Primer
acggactcctaggagtccgt

SEQ ID NO: 14267 - DNA, 20 bp, Artificial sequence
  Primer
accgactcctaggagtcggt

SEQ ID NO: 14268 - DNA, 20 bp, Artificial sequence
  Primer
atggactcctaggagtccat

SEQ ID NO: 14269 - DNA, 20 bp, Artificial sequence
  Primer
gatgactcagctgagtcatc

SEQ ID NO: 14270 - DNA, 20 bp, Artificial sequence
  Primer
gaagactcagctgagtcttc

SEQ ID NO: 14271 - DNA, 20 bp, Artificial sequence
  Primer
gaggactcagctgagtcctc

SEQ ID NO: 14272 - DNA, 20 bp, Artificial sequence
  Primer
ggtgactcagctgagtcacc

SEQ ID NO: 14273 - DNA, 20 bp, Artificial sequence
  Primer
ggagactcagctgagtctcc

SEQ ID NO: 14274 - DNA, 20 bp, Artificial sequence
  Primer
ggcgactcagctgagtcgcc

SEQ ID NO: 14275 - DNA, 20 bp, Artificial sequence
  Primer
gctgactcagctgagtcagc

SEQ ID NO: 14276 - DNA, 20 bp, Artificial sequence
  Primer
gcagactcagctgagtctgc

SEQ ID NO: 14277 - DNA, 20 bp, Artificial sequence
  Primer
gcggactcagctgagtccgc

SEQ ID NO: 14278 - DNA, 20 bp, Artificial sequence
  Primer
gccgactcagctgagtcggc

SEQ ID NO: 14279 - DNA, 20 bp, Artificial sequence
  Primer
gttgactcagctgagtcaac

SEQ ID NO: 14280 - DNA, 20 bp, Artificial sequence
  Primer
gtagactcagctgagtctac

SEQ ID NO: 14281 - DNA, 20 bp, Artificial sequence
  Primer
gtggactcagctgagtccac

SEQ ID NO: 14282 - DNA, 20 bp, Artificial sequence
  Primer
gatgactctcgagagtcatc

SEQ ID NO: 14283 - DNA, 20 bp, Artificial sequence
  Primer
gaagactctcgagagtcttc

SEQ ID NO: 14284 - DNA, 20 bp, Artificial sequence
  Primer
gaggactctcgagagtcctc

SEQ ID NO: 14285 - DNA, 20 bp, Artificial sequence
  Primer
gacgactctcgagagtcgtc

SEQ ID NO: 14286 - DNA, 20 bp, Artificial sequence
  Primer
ggtgactctcgagagtcacc

SEQ ID NO: 14287 - DNA, 20 bp, Artificial sequence
  Primer
ggagactctcgagagtctcc

SEQ ID NO: 14288 - DNA, 20 bp, Artificial sequence
  Primer
ggcgactctcgagagtcgcc

SEQ ID NO: 14289 - DNA, 20 bp, Artificial sequence
  Primer
gctgactctcgagagtcagc

SEQ ID NO: 14290 - DNA, 20 bp, Artificial sequence
  Primer
gcagactctcgagagtctgc

SEQ ID NO: 14291 - DNA, 20 bp, Artificial sequence
  Primer
gcggactctcgagagtccgc

SEQ ID NO: 14292 - DNA, 20 bp, Artificial sequence
  Primer
gttgactctcgagagtcaac

SEQ ID NO: 14293 - DNA, 20 bp, Artificial sequence
  Primer
gtagactctcgagagtctac

SEQ ID NO: 14294 - DNA, 20 bp, Artificial sequence
  Primer
gtggactctcgagagtccac

SEQ ID NO: 14295 - DNA, 20 bp, Artificial sequence
  Primer
gatgactcacgtgagtcatc

SEQ ID NO: 14296 - DNA, 20 bp, Artificial sequence
  Primer
gaagactcacgtgagtcttc

SEQ ID NO: 14297 - DNA, 20 bp, Artificial sequence
  Primer
gaggactcacgtgagtcctc

SEQ ID NO: 14298 - DNA, 20 bp, Artificial sequence
  Primer
gacgactcacgtgagtcgtc

SEQ ID NO: 14299 - DNA, 20 bp, Artificial sequence
  Primer
ggtgactcacgtgagtcacc

SEQ ID NO: 14300 - DNA, 20 bp, Artificial sequence
  Primer
ggagactcacgtgagtctcc

SEQ ID NO: 14301 - DNA, 20 bp, Artificial sequence
  Primer
ggcgactcacgtgagtcgcc

SEQ ID NO: 14302 - DNA, 20 bp, Artificial sequence
  Primer
gctgactcacgtgagtcagc

SEQ ID NO: 14303 - DNA, 20 bp, Artificial sequence
  Primer
gcagactcacgtgagtctgc

SEQ ID NO: 14304 - DNA, 20 bp, Artificial sequence
  Primer
gcggactcacgtgagtccgc

SEQ ID NO: 14305 - DNA, 20 bp, Artificial sequence
  Primer
gccgactcacgtgagtcggc

SEQ ID NO: 14306 - DNA, 20 bp, Artificial sequence
  Primer
gttgactcacgtgagtcaac

SEQ ID NO: 14307 - DNA, 20 bp, Artificial sequence
  Primer
gtagactcacgtgagtctac

SEQ ID NO: 14308 - DNA, 20 bp, Artificial sequence
  Primer
gtggactcacgtgagtccac

SEQ ID NO: 14309 - DNA, 20 bp, Artificial sequence
  Primer
gatgactccatggagtcatc

SEQ ID NO: 14310 - DNA, 20 bp, Artificial sequence
  Primer
gaagactccatggagtcttc

SEQ ID NO: 14311 - DNA, 20 bp, Artificial sequence
  Primer
gaggactccatggagtcctc

SEQ ID NO: 14312 - DNA, 20 bp, Artificial sequence
  Primer
gacgactccatggagtcgtc

SEQ ID NO: 14313 - DNA, 20 bp, Artificial sequence
  Primer
ggtgactccatggagtcacc

SEQ ID NO: 14314 - DNA, 20 bp, Artificial sequence
  Primer
ggagactccatggagtctcc

SEQ ID NO: 14315 - DNA, 20 bp, Artificial sequence
  Primer
ggcgactccatggagtcgcc

SEQ ID NO: 14316 - DNA, 20 bp, Artificial sequence
  Primer
gctgactccatggagtcagc

SEQ ID NO: 14317 - DNA, 20 bp, Artificial sequence
  Primer
gcagactccatggagtctgc

SEQ ID NO: 14318 - DNA, 20 bp, Artificial sequence
  Primer
gcggactccatggagtccgc

SEQ ID NO: 14319 - DNA, 20 bp, Artificial sequence
  Primer
gccgactccatggagtcggc

SEQ ID NO: 14320 - DNA, 20 bp, Artificial sequence
  Primer
gttgactccatggagtcaac

SEQ ID NO: 14321 - DNA, 20 bp, Artificial sequence
  Primer
gtagactccatggagtctac

SEQ ID NO: 14322 - DNA, 20 bp, Artificial sequence
  Primer
gtggactccatggagtccac

SEQ ID NO: 14323 - DNA, 20 bp, Artificial sequence
  Primer
gatgactcgtacgagtcatc

SEQ ID NO: 14324 - DNA, 20 bp, Artificial sequence
  Primer
gaagactcgtacgagtcttc

SEQ ID NO: 14325 - DNA, 20 bp, Artificial sequence
  Primer
gaggactcgtacgagtcctc

SEQ ID NO: 14326 - DNA, 20 bp, Artificial sequence
  Primer
gacgactcgtacgagtcgtc

SEQ ID NO: 14327 - DNA, 20 bp, Artificial sequence
  Primer
ggtgactcgtacgagtcacc

SEQ ID NO: 14328 - DNA, 20 bp, Artificial sequence
  Primer
ggagactcgtacgagtctcc

SEQ ID NO: 14329 - DNA, 20 bp, Artificial sequence
  Primer
ggcgactcgtacgagtcgcc

SEQ ID NO: 14330 - DNA, 20 bp, Artificial sequence
  Primer
gctgactcgtacgagtcagc

SEQ ID NO: 14331 - DNA, 20 bp, Artificial sequence
  Primer
gcagactcgtacgagtctgc

SEQ ID NO: 14332 - DNA, 20 bp, Artificial sequence
  Primer
gcggactcgtacgagtccgc

SEQ ID NO: 14333 - DNA, 20 bp, Artificial sequence
  Primer
gccgactcgtacgagtcggc

SEQ ID NO: 14334 - DNA, 20 bp, Artificial sequence
  Primer
gttgactcgtacgagtcaac

SEQ ID NO: 14335 - DNA, 20 bp, Artificial sequence
  Primer
gtagactcgtacgagtctac

SEQ ID NO: 14336 - DNA, 20 bp, Artificial sequence
  Primer
gtggactcgtacgagtccac

SEQ ID NO: 14337 - DNA, 20 bp, Artificial sequence
  Primer
gatgactcctaggagtcatc

SEQ ID NO: 14338 - DNA, 20 bp, Artificial sequence
  Primer
gaagactcctaggagtcttc

SEQ ID NO: 14339 - DNA, 20 bp, Artificial sequence
  Primer
gaggactcctaggagtcctc

SEQ ID NO: 14340 - DNA, 20 bp, Artificial sequence
  Primer
gacgactcctaggagtcgtc

SEQ ID NO: 14341 - DNA, 20 bp, Artificial sequence
  Primer
ggtgactcctaggagtcacc

SEQ ID NO: 14342 - DNA, 20 bp, Artificial sequence
  Primer
ggagactcctaggagtctcc

SEQ ID NO: 14343 - DNA, 20 bp, Artificial sequence
  Primer
ggcgactcctaggagtcgcc

SEQ ID NO: 14344 - DNA, 20 bp, Artificial sequence
  Primer
gctgactcctaggagtcagc

SEQ ID NO: 14345 - DNA, 20 bp, Artificial sequence
  Primer
gcagactcctaggagtctgc

SEQ ID NO: 14346 - DNA, 20 bp, Artificial sequence
  Primer
gcggactcctaggagtccgc

SEQ ID NO: 14347 - DNA, 20 bp, Artificial sequence
  Primer
gccgactcctaggagtcggc

SEQ ID NO: 14348 - DNA, 20 bp, Artificial sequence
  Primer
gttgactcctaggagtcaac

SEQ ID NO: 14349 - DNA, 20 bp, Artificial sequence
  Primer
gtagactcctaggagtctac

SEQ ID NO: 14350 - DNA, 20 bp, Artificial sequence
  Primer
gtggactcctaggagtccac

SEQ ID NO: 14351 - DNA, 20 bp, Artificial sequence
  Primer
caagactcagctgagtcttg

SEQ ID NO: 14352 - DNA, 20 bp, Artificial sequence
  Primer
caggactcagctgagtcctg

SEQ ID NO: 14353 - DNA, 20 bp, Artificial sequence
  Primer
cgtgactcagctgagtcacg

SEQ ID NO: 14354 - DNA, 20 bp, Artificial sequence
  Primer
cgagactcagctgagtctcg

SEQ ID NO: 14355 - DNA, 20 bp, Artificial sequence
  Primer
cgggactcagctgagtcccg

SEQ ID NO: 14356 - DNA, 20 bp, Artificial sequence
  Primer
cgcgactcagctgagtcgcg

SEQ ID NO: 14357 - DNA, 20 bp, Artificial sequence
  Primer
cctgactcagctgagtcagg

SEQ ID NO: 14358 - DNA, 20 bp, Artificial sequence
  Primer
ccagactcagctgagtctgg

SEQ ID NO: 14359 - DNA, 20 bp, Artificial sequence
  Primer
ccggactcagctgagtccgg

SEQ ID NO: 14360 - DNA, 20 bp, Artificial sequence
  Primer
cccgactcagctgagtcggg

SEQ ID NO: 14361 - DNA, 20 bp, Artificial sequence
  Primer
cttgactcagctgagtcaag

SEQ ID NO: 14362 - DNA, 20 bp, Artificial sequence
  Primer
ctagactcagctgagtctag

SEQ ID NO: 14363 - DNA, 20 bp, Artificial sequence
  Primer
ctggactcagctgagtccag

SEQ ID NO: 14364 - DNA, 20 bp, Artificial sequence
  Primer
caagactctcgagagtcttg

SEQ ID NO: 14365 - DNA, 20 bp, Artificial sequence
  Primer
caggactctcgagagtcctg

SEQ ID NO: 14366 - DNA, 20 bp, Artificial sequence
  Primer
cacgactctcgagagtcgtg

SEQ ID NO: 14367 - DNA, 20 bp, Artificial sequence
  Primer
cgtgactctcgagagtcacg

SEQ ID NO: 14368 - DNA, 20 bp, Artificial sequence
  Primer
cgagactctcgagagtctcg

SEQ ID NO: 14369 - DNA, 20 bp, Artificial sequence
  Primer
cgggactctcgagagtcccg

SEQ ID NO: 14370 - DNA, 20 bp, Artificial sequence
  Primer
cgcgactctcgagagtcgcg

SEQ ID NO: 14371 - DNA, 20 bp, Artificial sequence
  Primer
cctgactctcgagagtcagg

SEQ ID NO: 14372 - DNA, 20 bp, Artificial sequence
  Primer
ccagactctcgagagtctgg

SEQ ID NO: 14373 - DNA, 20 bp, Artificial sequence
  Primer
ccggactctcgagagtccgg

SEQ ID NO: 14374 - DNA, 20 bp, Artificial sequence
  Primer
cttgactctcgagagtcaag

SEQ ID NO: 14375 - DNA, 20 bp, Artificial sequence
  Primer
ctagactctcgagagtctag

SEQ ID NO: 14376 - DNA, 20 bp, Artificial sequence
  Primer
ctggactctcgagagtccag

SEQ ID NO: 14377 - DNA, 20 bp, Artificial sequence
  Primer
caagactcacgtgagtcttg

SEQ ID NO: 14378 - DNA, 20 bp, Artificial sequence
  Primer
caggactcacgtgagtcctg

SEQ ID NO: 14379 - DNA, 20 bp, Artificial sequence
  Primer
cacgactcacgtgagtcgtg

SEQ ID NO: 14380 - DNA, 20 bp, Artificial sequence
  Primer
cgtgactcacgtgagtcacg

SEQ ID NO: 14381 - DNA, 20 bp, Artificial sequence
  Primer
cgagactcacgtgagtctcg

SEQ ID NO: 14382 - DNA, 20 bp, Artificial sequence
  Primer
cgggactcacgtgagtcccg

SEQ ID NO: 14383 - DNA, 20 bp, Artificial sequence
  Primer
cgcgactcacgtgagtcgcg

SEQ ID NO: 14384 - DNA, 20 bp, Artificial sequence
  Primer
cctgactcacgtgagtcagg

SEQ ID NO: 14385 - DNA, 20 bp, Artificial sequence
  Primer
ccagactcacgtgagtctgg

SEQ ID NO: 14386 - DNA, 20 bp, Artificial sequence
  Primer
ccggactcacgtgagtccgg

SEQ ID NO: 14387 - DNA, 20 bp, Artificial sequence
  Primer
cccgactcacgtgagtcggg

SEQ ID NO: 14388 - DNA, 20 bp, Artificial sequence
  Primer
cttgactcacgtgagtcaag

SEQ ID NO: 14389 - DNA, 20 bp, Artificial sequence
  Primer
ctagactcacgtgagtctag

SEQ ID NO: 14390 - DNA, 20 bp, Artificial sequence
  Primer
ctggactcacgtgagtccag

SEQ ID NO: 14391 - DNA, 20 bp, Artificial sequence
  Primer
caagactccatggagtcttg

SEQ ID NO: 14392 - DNA, 20 bp, Artificial sequence
  Primer
caggactccatggagtcctg

SEQ ID NO: 14393 - DNA, 20 bp, Artificial sequence
  Primer
cacgactccatggagtcgtg

SEQ ID NO: 14394 - DNA, 20 bp, Artificial sequence
  Primer
cgtgactccatggagtcacg

SEQ ID NO: 14395 - DNA, 20 bp, Artificial sequence
  Primer
cgagactccatggagtctcg

SEQ ID NO: 14396 - DNA, 20 bp, Artificial sequence
  Primer
cgggactccatggagtcccg

SEQ ID NO: 14397 - DNA, 20 bp, Artificial sequence
  Primer
cgcgactccatggagtcgcg

SEQ ID NO: 14398 - DNA, 20 bp, Artificial sequence
  Primer
cctgactccatggagtcagg

SEQ ID NO: 14399 - DNA, 20 bp, Artificial sequence
  Primer
ccagactccatggagtctgg

SEQ ID NO: 14400 - DNA, 20 bp, Artificial sequence
  Primer
ccggactccatggagtccgg

SEQ ID NO: 14401 - DNA, 20 bp, Artificial sequence
  Primer
cccgactccatggagtcggg

SEQ ID NO: 14402 - DNA, 20 bp, Artificial sequence
  Primer
cttgactccatggagtcaag

SEQ ID NO: 14403 - DNA, 20 bp, Artificial sequence
  Primer
ctagactccatggagtctag

SEQ ID NO: 14404 - DNA, 20 bp, Artificial sequence
  Primer
ctggactccatggagtccag

SEQ ID NO: 14405 - DNA, 20 bp, Artificial sequence
  Primer
caagactcgtacgagtcttg

SEQ ID NO: 14406 - DNA, 20 bp, Artificial sequence
  Primer
caggactcgtacgagtcctg

SEQ ID NO: 14407 - DNA, 20 bp, Artificial sequence
  Primer
cacgactcgtacgagtcgtg

SEQ ID NO: 14408 - DNA, 20 bp, Artificial sequence
  Primer
cgtgactcgtacgagtcacg

SEQ ID NO: 14409 - DNA, 20 bp, Artificial sequence
  Primer
cgagactcgtacgagtctcg

SEQ ID NO: 14410 - DNA, 20 bp, Artificial sequence
  Primer
cgggactcgtacgagtcccg

SEQ ID NO: 14411 - DNA, 20 bp, Artificial sequence
  Primer
cgcgactcgtacgagtcgcg

SEQ ID NO: 14412 - DNA, 20 bp, Artificial sequence
  Primer
cctgactcgtacgagtcagg

SEQ ID NO: 14413 - DNA, 20 bp, Artificial sequence
  Primer
ccagactcgtacgagtctgg

SEQ ID NO: 14414 - DNA, 20 bp, Artificial sequence
  Primer
ccggactcgtacgagtccgg

SEQ ID NO: 14415 - DNA, 20 bp, Artificial sequence
  Primer
cccgactcgtacgagtcggg

SEQ ID NO: 14416 - DNA, 20 bp, Artificial sequence
  Primer
cttgactcgtacgagtcaag

SEQ ID NO: 14417 - DNA, 20 bp, Artificial sequence
  Primer
ctagactcgtacgagtctag

SEQ ID NO: 14418 - DNA, 20 bp, Artificial sequence
  Primer
ctggactcgtacgagtccag

SEQ ID NO: 14419 - DNA, 20 bp, Artificial sequence
  Primer
caagactcctaggagtcttg

SEQ ID NO: 14420 - DNA, 20 bp, Artificial sequence
  Primer
caggactcctaggagtcctg

SEQ ID NO: 14421 - DNA, 20 bp, Artificial sequence
  Primer
cacgactcctaggagtcgtg

SEQ ID NO: 14422 - DNA, 20 bp, Artificial sequence
  Primer
cgtgactcctaggagtcacg

SEQ ID NO: 14423 - DNA, 20 bp, Artificial sequence
  Primer
cgagactcctaggagtctcg

SEQ ID NO: 14424 - DNA, 20 bp, Artificial sequence
  Primer
cgggactcctaggagtcccg

SEQ ID NO: 14425 - DNA, 20 bp, Artificial sequence
  Primer
cgcgactcctaggagtcgcg

SEQ ID NO: 14426 - DNA, 20 bp, Artificial sequence
  Primer
cctgactcctaggagtcagg

SEQ ID NO: 14427 - DNA, 20 bp, Artificial sequence
  Primer
ccagactcctaggagtctgg

SEQ ID NO: 14428 - DNA, 20 bp, Artificial sequence
  Primer
ccggactcctaggagtccgg

SEQ ID NO: 14429 - DNA, 20 bp, Artificial sequence
  Primer
cccgactcctaggagtcggg

SEQ ID NO: 14430 - DNA, 20 bp, Artificial sequence
  Primer
cttgactcctaggagtcaag

SEQ ID NO: 14431 - DNA, 20 bp, Artificial sequence
  Primer
ctagactcctaggagtctag

SEQ ID NO: 14432 - DNA, 20 bp, Artificial sequence
  Primer
ctggactcctaggagtccag

SEQ ID NO: 14433 - DNA, 18 bp, Artificial sequence
  Primer
atgactccgcggagtcat

SEQ ID NO: 14434 - DNA, 18 bp, Artificial sequence
  Primer
aagactccgcggagtctt

SEQ ID NO: 14435 - DNA, 18 bp, Artificial sequence
  Primer
aggactccgcggagtcct

SEQ ID NO: 14436 - DNA, 18 bp, Artificial sequence
  Primer
acgactccgcggagtcgt

SEQ ID NO: 14437 - DNA, 18 bp, Artificial sequence
  Primer
gtgactccgcggagtcac

SEQ ID NO: 14438 - DNA, 18 bp, Artificial sequence
  Primer
gagactccgcggagtctc

SEQ ID NO: 14439 - DNA, 18 bp, Artificial sequence
  Primer
gggactccgcggagtccc

SEQ ID NO: 14440 - DNA, 18 bp, Artificial sequence
  Primer
gcgactccgcggagtcgc

SEQ ID NO: 14441 - DNA, 18 bp, Artificial sequence
  Primer
ctgactccgcggagtcag

SEQ ID NO: 14442 - DNA, 18 bp, Artificial sequence
  Primer
cagactccgcggagtctg

SEQ ID NO: 14443 - DNA, 18 bp, Artificial sequence
  Primer
cggactccgcggagtccg

SEQ ID NO: 14444 - DNA, 18 bp, Artificial sequence
  Primer
ccgactccgcggagtcgg

SEQ ID NO: 14445 - DNA, 18 bp, Artificial sequence
  Primer
ttgactccgcggagtcaa

SEQ ID NO: 14446 - DNA, 18 bp, Artificial sequence
  Primer
tagactccgcggagtcta

SEQ ID NO: 14447 - DNA, 18 bp, Artificial sequence
  Primer
tggactccgcggagtcca

SEQ ID NO: 14448 - DNA, 18 bp, Artificial sequence
  Primer
atgactcccgggagtcat

SEQ ID NO: 14449 - DNA, 18 bp, Artificial sequence
  Primer
aagactcccgggagtctt

SEQ ID NO: 14450 - DNA, 18 bp, Artificial sequence
  Primer
aggactcccgggagtcct

SEQ ID NO: 14451 - DNA, 18 bp, Artificial sequence
  Primer
acgactcccgggagtcgt

SEQ ID NO: 14452 - DNA, 18 bp, Artificial sequence
  Primer
gtgactcccgggagtcac

SEQ ID NO: 14453 - DNA, 18 bp, Artificial sequence
  Primer
gagactcccgggagtctc

SEQ ID NO: 14454 - DNA, 18 bp, Artificial sequence
  Primer
gggactcccgggagtccc

SEQ ID NO: 14455 - DNA, 18 bp, Artificial sequence
  Primer
gcgactcccgggagtcgc

SEQ ID NO: 14456 - DNA, 18 bp, Artificial sequence
  Primer
ctgactcccgggagtcag

SEQ ID NO: 14457 - DNA, 18 bp, Artificial sequence
  Primer
cagactcccgggagtctg

SEQ ID NO: 14458 - DNA, 18 bp, Artificial sequence
  Primer
cggactcccgggagtccg

SEQ ID NO: 14459 - DNA, 18 bp, Artificial sequence
  Primer
ccgactcccgggagtcgg

SEQ ID NO: 14460 - DNA, 18 bp, Artificial sequence
  Primer
ttgactcccgggagtcaa

SEQ ID NO: 14461 - DNA, 18 bp, Artificial sequence
  Primer
tagactcccgggagtcta

SEQ ID NO: 14462 - DNA, 18 bp, Artificial sequence
  Primer
tggactcccgggagtcca

SEQ ID NO: 14463 - DNA, 18 bp, Artificial sequence
  Primer
atgactcggccgagtcat

SEQ ID NO: 14464 - DNA, 18 bp, Artificial sequence
  Primer
aagactcggccgagtctt

SEQ ID NO: 14465 - DNA, 18 bp, Artificial sequence
  Primer
aggactcggccgagtcct

SEQ ID NO: 14466 - DNA, 18 bp, Artificial sequence
  Primer
acgactcggccgagtcgt

SEQ ID NO: 14467 - DNA, 18 bp, Artificial sequence
  Primer
gtgactcggccgagtcac

SEQ ID NO: 14468 - DNA, 18 bp, Artificial sequence
  Primer
gagactcggccgagtctc

SEQ ID NO: 14469 - DNA, 18 bp, Artificial sequence
  Primer
gggactcggccgagtccc

SEQ ID NO: 14470 - DNA, 18 bp, Artificial sequence
  Primer
gcgactcggccgagtcgc

SEQ ID NO: 14471 - DNA, 18 bp, Artificial sequence
  Primer
ctgactcggccgagtcag

SEQ ID NO: 14472 - DNA, 18 bp, Artificial sequence
  Primer
cagactcggccgagtctg

SEQ ID NO: 14473 - DNA, 18 bp, Artificial sequence
  Primer
cggactcggccgagtccg

SEQ ID NO: 14474 - DNA, 18 bp, Artificial sequence
  Primer
ccgactcggccgagtcgg

SEQ ID NO: 14475 - DNA, 18 bp, Artificial sequence
  Primer
ttgactcggccgagtcaa

SEQ ID NO: 14476 - DNA, 18 bp, Artificial sequence
  Primer
tagactcggccgagtcta

SEQ ID NO: 14477 - DNA, 18 bp, Artificial sequence
  Primer
tggactcggccgagtcca

SEQ ID NO: 14478 - DNA, 18 bp, Artificial sequence
  Primer
atgactcgcgcgagtcat

SEQ ID NO: 14479 - DNA, 18 bp, Artificial sequence
  Primer
aagactcgcgcgagtctt

SEQ ID NO: 14480 - DNA, 18 bp, Artificial sequence
  Primer
aggactcgcgcgagtcct

SEQ ID NO: 14481 - DNA, 18 bp, Artificial sequence
  Primer
acgactcgcgcgagtcgt

SEQ ID NO: 14482 - DNA, 18 bp, Artificial sequence
  Primer
gtgactcgcgcgagtcac

SEQ ID NO: 14483 - DNA, 18 bp, Artificial sequence
  Primer
gagactcgcgcgagtctc

SEQ ID NO: 14484 - DNA, 18 bp, Artificial sequence
  Primer
gggactcgcgcgagtccc

SEQ ID NO: 14485 - DNA, 18 bp, Artificial sequence
  Primer
gcgactcgcgcgagtcgc

SEQ ID NO: 14486 - DNA, 18 bp, Artificial sequence
  Primer
ctgactcgcgcgagtcag

SEQ ID NO: 14487 - DNA, 18 bp, Artificial sequence
  Primer
cagactcgcgcgagtctg

SEQ ID NO: 14488 - DNA, 18 bp, Artificial sequence
  Primer
cggactcgcgcgagtccg

SEQ ID NO: 14489 - DNA, 18 bp, Artificial sequence
  Primer
ccgactcgcgcgagtcgg

SEQ ID NO: 14490 - DNA, 18 bp, Artificial sequence
  Primer
ttgactcgcgcgagtcaa

SEQ ID NO: 14491 - DNA, 18 bp, Artificial sequence
  Primer
tagactcgcgcgagtcta

SEQ ID NO: 14492 - DNA, 18 bp, Artificial sequence
  Primer
tggactcgcgcgagtcca

SEQ ID NO: 14493 - DNA, 18 bp, Artificial sequence
  Primer
aggactctgcagagtcct

SEQ ID NO: 14494 - DNA, 18 bp, Artificial sequence
  Primer
acgactctgcagagtcgt

SEQ ID NO: 14495 - DNA, 18 bp, Artificial sequence
  Primer
gtgactctgcagagtcac

SEQ ID NO: 14496 - DNA, 18 bp, Artificial sequence
  Primer
gagactctgcagagtctc

SEQ ID NO: 14497 - DNA, 18 bp, Artificial sequence
  Primer
gggactctgcagagtccc

SEQ ID NO: 14498 - DNA, 18 bp, Artificial sequence
  Primer
gcgactctgcagagtcgc

SEQ ID NO: 14499 - DNA, 18 bp, Artificial sequence
  Primer
ctgactctgcagagtcag

SEQ ID NO: 14500 - DNA, 18 bp, Artificial sequence
  Primer
cagactctgcagagtctg

SEQ ID NO: 14501 - DNA, 18 bp, Artificial sequence
  Primer
cggactctgcagagtccg

SEQ ID NO: 14502 - DNA, 18 bp, Artificial sequence
  Primer
ccgactctgcagagtcgg

SEQ ID NO: 14503 - DNA, 18 bp, Artificial sequence
  Primer
ttgactctgcagagtcaa

SEQ ID NO: 14504 - DNA, 18 bp, Artificial sequence
  Primer
tggactctgcagagtcca

SEQ ID NO: 14505 - DNA, 18 bp, Artificial sequence
  Primer
aggactcagctgagtcct

SEQ ID NO: 14506 - DNA, 18 bp, Artificial sequence
  Primer
acgactcagctgagtcgt

SEQ ID NO: 14507 - DNA, 18 bp, Artificial sequence
  Primer
gtgactcagctgagtcac

SEQ ID NO: 14508 - DNA, 18 bp, Artificial sequence
  Primer
gagactcagctgagtctc

SEQ ID NO: 14509 - DNA, 18 bp, Artificial sequence
  Primer
gggactcagctgagtccc

SEQ ID NO: 14510 - DNA, 18 bp, Artificial sequence
  Primer
gcgactcagctgagtcgc

SEQ ID NO: 14511 - DNA, 18 bp, Artificial sequence
  Primer
ctgactcagctgagtcag

SEQ ID NO: 14512 - DNA, 18 bp, Artificial sequence
  Primer
cagactcagctgagtctg

SEQ ID NO: 14513 - DNA, 18 bp, Artificial sequence
  Primer
cggactcagctgagtccg

SEQ ID NO: 14514 - DNA, 18 bp, Artificial sequence
  Primer
ccgactcagctgagtcgg

SEQ ID NO: 14515 - DNA, 18 bp, Artificial sequence
  Primer
ttgactcagctgagtcaa

SEQ ID NO: 14516 - DNA, 18 bp, Artificial sequence
  Primer
tggactcagctgagtcca

SEQ ID NO: 14517 - DNA, 18 bp, Artificial sequence
  Primer
aggactctcgagagtcct

SEQ ID NO: 14518 - DNA, 18 bp, Artificial sequence
  Primer
acgactctcgagagtcgt

SEQ ID NO: 14519 - DNA, 18 bp, Artificial sequence
  Primer
gtgactctcgagagtcac

SEQ ID NO: 14520 - DNA, 18 bp, Artificial sequence
  Primer
gggactctcgagagtccc

SEQ ID NO: 14521 - DNA, 18 bp, Artificial sequence
  Primer
gcgactctcgagagtcgc

SEQ ID NO: 14522 - DNA, 18 bp, Artificial sequence
  Primer
ctgactctcgagagtcag

SEQ ID NO: 14523 - DNA, 18 bp, Artificial sequence
  Primer
cagactctcgagagtctg

SEQ ID NO: 14524 - DNA, 18 bp, Artificial sequence
  Primer
cggactctcgagagtccg

SEQ ID NO: 14525 - DNA, 18 bp, Artificial sequence
  Primer
ccgactctcgagagtcgg

SEQ ID NO: 14526 - DNA, 18 bp, Artificial sequence
  Primer
tggactctcgagagtcca

SEQ ID NO: 14527 - DNA, 18 bp, Artificial sequence
  Primer
aggactctcgagagtcct

SEQ ID NO: 14528 - DNA, 18 bp, Artificial sequence
  Primer
acgactctcgagagtcgt

SEQ ID NO: 14529 - DNA, 18 bp, Artificial sequence
  Primer
gtgactctcgagagtcac

SEQ ID NO: 14530 - DNA, 18 bp, Artificial sequence
  Primer
gggactctcgagagtccc

SEQ ID NO: 14531 - DNA, 18 bp, Artificial sequence
  Primer
gcgactctcgagagtcgc

SEQ ID NO: 14532 - DNA, 18 bp, Artificial sequence
  Primer
ctgactctcgagagtcag

SEQ ID NO: 14533 - DNA, 18 bp, Artificial sequence
  Primer
cagactctcgagagtctg

SEQ ID NO: 14534 - DNA, 18 bp, Artificial sequence
  Primer
cggactctcgagagtccg

SEQ ID NO: 14535 - DNA, 18 bp, Artificial sequence
  Primer
ccgactctcgagagtcgg

SEQ ID NO: 14536 - DNA, 18 bp, Artificial sequence
  Primer
tggactctcgagagtcca

SEQ ID NO: 14537 - DNA, 18 bp, Artificial sequence
  Primer
atgactcacgtgagtcat

SEQ ID NO: 14538 - DNA, 18 bp, Artificial sequence
  Primer
aggactcacgtgagtcct

SEQ ID NO: 14539 - DNA, 18 bp, Artificial sequence
  Primer
acgactcacgtgagtcgt

SEQ ID NO: 14540 - DNA, 18 bp, Artificial sequence
  Primer
gtgactcacgtgagtcac

SEQ ID NO: 14541 - DNA, 18 bp, Artificial sequence
  Primer
gagactcacgtgagtctc

SEQ ID NO: 14542 - DNA, 18 bp, Artificial sequence
  Primer
gggactcacgtgagtccc

SEQ ID NO: 14543 - DNA, 18 bp, Artificial sequence
  Primer
gcgactcacgtgagtcgc

SEQ ID NO: 14544 - DNA, 18 bp, Artificial sequence
  Primer
ctgactcacgtgagtcag

SEQ ID NO: 14545 - DNA, 18 bp, Artificial sequence
  Primer
cagactcacgtgagtctg

SEQ ID NO: 14546 - DNA, 18 bp, Artificial sequence
  Primer
cggactcacgtgagtccg

SEQ ID NO: 14547 - DNA, 18 bp, Artificial sequence
  Primer
ccgactcacgtgagtcgg

SEQ ID NO: 14548 - DNA, 18 bp, Artificial sequence
  Primer
ttgactcacgtgagtcaa

SEQ ID NO: 14549 - DNA, 18 bp, Artificial sequence
  Primer
tggactcacgtgagtcca

SEQ ID NO: 14550 - DNA, 18 bp, Artificial sequence
  Primer
aggactccatggagtcct

SEQ ID NO: 14551 - DNA, 18 bp, Artificial sequence
  Primer
acgactccatggagtcgt

SEQ ID NO: 14552 - DNA, 18 bp, Artificial sequence
  Primer
gtgactccatggagtcac

SEQ ID NO: 14553 - DNA, 18 bp, Artificial sequence
  Primer
gagactccatggagtctc

SEQ ID NO: 14554 - DNA, 18 bp, Artificial sequence
  Primer
gggactccatggagtccc

SEQ ID NO: 14555 - DNA, 18 bp, Artificial sequence
  Primer
gcgactccatggagtcgc

SEQ ID NO: 14556 - DNA, 18 bp, Artificial sequence
  Primer
ctgactccatggagtcag

SEQ ID NO: 14557 - DNA, 18 bp, Artificial sequence
  Primer
cagactccatggagtctg

SEQ ID NO: 14558 - DNA, 18 bp, Artificial sequence
  Primer
cggactccatggagtccg

SEQ ID NO: 14559 - DNA, 18 bp, Artificial sequence
  Primer
ccgactccatggagtcgg

SEQ ID NO: 14560 - DNA, 18 bp, Artificial sequence
  Primer
ttgactccatggagtcaa

SEQ ID NO: 14561 - DNA, 18 bp, Artificial sequence
  Primer
tggactccatggagtcca

SEQ ID NO: 14562 - DNA, 18 bp, Artificial sequence
  Primer
aggactcgtacgagtcct

SEQ ID NO: 14563 - DNA, 18 bp, Artificial sequence
  Primer
acgactcgtacgagtcgt

SEQ ID NO: 14564 - DNA, 18 bp, Artificial sequence
  Primer
gtgactcgtacgagtcac

SEQ ID NO: 14565 - DNA, 18 bp, Artificial sequence
  Primer
gagactcgtacgagtctc

SEQ ID NO: 14566 - DNA, 18 bp, Artificial sequence
  Primer
gggactcgtacgagtccc

SEQ ID NO: 14567 - DNA, 18 bp, Artificial sequence
  Primer
gcgactcgtacgagtcgc

SEQ ID NO: 14568 - DNA, 18 bp, Artificial sequence
  Primer
ctgactcgtacgagtcag

SEQ ID NO: 14569 - DNA, 18 bp, Artificial sequence
  Primer
cagactcgtacgagtctg

SEQ ID NO: 14570 - DNA, 18 bp, Artificial sequence
  Primer
cggactcgtacgagtccg

SEQ ID NO: 14571 - DNA, 18 bp, Artificial sequence
  Primer
ccgactcgtacgagtcgg

SEQ ID NO: 14572 - DNA, 18 bp, Artificial sequence
  Primer
tggactcgtacgagtcca

SEQ ID NO: 14573 - DNA, 18 bp, Artificial sequence
  Primer
aggactcctaggagtcct

SEQ ID NO: 14574 - DNA, 18 bp, Artificial sequence
  Primer
acgactcctaggagtcgt

SEQ ID NO: 14575 - DNA, 18 bp, Artificial sequence
  Primer
gtgactcctaggagtcac

SEQ ID NO: 14576 - DNA, 18 bp, Artificial sequence
  Primer
gggactcctaggagtccc

SEQ ID NO: 14577 - DNA, 18 bp, Artificial sequence
  Primer
gcgactcctaggagtcgc

SEQ ID NO: 14578 - DNA, 18 bp, Artificial sequence
  Primer
cggactcctaggagtccg

SEQ ID NO: 14579 - DNA, 18 bp, Artificial sequence
  Primer
ccgactcctaggagtcgg

SEQ ID NO: 14580 - DNA, 18 bp, Artificial sequence
  Primer
tggactcctaggagtcca

SEQ ID NO: 14581 - DNA, 16 bp, Artificial sequence
  Primer
tgactccgcggagtca

SEQ ID NO: 14582 - DNA, 16 bp, Artificial sequence
  Primer
agactccgcggagtct

SEQ ID NO: 14583 - DNA, 16 bp, Artificial sequence
  Primer
ggactccgcggagtcc

SEQ ID NO: 14584 - DNA, 16 bp, Artificial sequence
  Primer
cgactccgcggagtcg

SEQ ID NO: 14585 - DNA, 16 bp, Artificial sequence
  Primer
tgactcggccgagtca

SEQ ID NO: 14586 - DNA, 16 bp, Artificial sequence
  Primer
agactcggccgagtct

SEQ ID NO: 14587 - DNA, 16 bp, Artificial sequence
  Primer
ggactcggccgagtcc

SEQ ID NO: 14588 - DNA, 16 bp, Artificial sequence
  Primer
cgactcggccgagtcg

SEQ ID NO: 14589 - DNA, 16 bp, Artificial sequence
  Primer
tgactcgcgcgagtca

SEQ ID NO: 14590 - DNA, 16 bp, Artificial sequence
  Primer
agactcgcgcgagtct

SEQ ID NO: 14591 - DNA, 16 bp, Artificial sequence
  Primer
ggactcgcgcgagtcc

SEQ ID NO: 14592 - DNA, 16 bp, Artificial sequence
  Primer
cgactcgcgcgagtcg

SEQ ID NO: 14593 - DNA, 16 bp, Artificial sequence
  Primer
tgactcccgggagtca

SEQ ID NO: 14594 - DNA, 16 bp, Artificial sequence
  Primer
agactcccgggagtct

SEQ ID NO: 14595 - DNA, 16 bp, Artificial sequence
  Primer
ggactcccgggagtcc

SEQ ID NO: 14596 - DNA, 16 bp, Artificial sequence
  Primer
cgactcccgggagtcg

SEQ ID NO: 14597 - DNA, 16 bp, Artificial sequence
  Primer
ggactctgcagagtcc

SEQ ID NO: 14598 - DNA, 16 bp, Artificial sequence
  Primer
cgactctgcagagtcg

SEQ ID NO: 14599 - DNA, 16 bp, Artificial sequence
  Primer
ggactcagctgagtcc

SEQ ID NO: 14600 - DNA, 16 bp, Artificial sequence
  Primer
cgactcagctgagtcg

SEQ ID NO: 14601 - DNA, 16 bp, Artificial sequence
  Primer
ggactctcgagagtcc

SEQ ID NO: 14602 - DNA, 16 bp, Artificial sequence
  Primer
cgactctcgagagtcg

SEQ ID NO: 14603 - DNA, 16 bp, Artificial sequence
  Primer
ggactcacgtgagtcc

SEQ ID NO: 14604 - DNA, 16 bp, Artificial sequence
  Primer
cgactcacgtgagtcg

SEQ ID NO: 14605 - DNA, 16 bp, Artificial sequence
  Primer
ggactccatggagtcc

SEQ ID NO: 14606 - DNA, 16 bp, Artificial sequence
  Primer
cgactccatggagtcg

SEQ ID NO: 14607 - DNA, 16 bp, Artificial sequence
  Primer
ggactcgtacgagtcc

SEQ ID NO: 14608 - DNA, 16 bp, Artificial sequence
  Primer
cgactcgtacgagtcg

SEQ ID NO: 14609 - DNA, 16 bp, Artificial sequence
  Primer
ggactcctaggagtcc

SEQ ID NO: 14610 - DNA, 16 bp, Artificial sequence
  Primer
cgactcctaggagtcg

SEQ ID NO: 14611 - DNA, 19 bp, Artificial sequence
  Primer
tcagactcgcgagtctgaa

SEQ ID NO: 14612 - DNA, 19 bp, Artificial sequence
  Primer
tcagactcgcgagtctgat

SEQ ID NO: 14613 - DNA, 19 bp, Artificial sequence
  Primer
tcagactcgcgagtctgac

SEQ ID NO: 14614 - DNA, 19 bp, Artificial sequence
  Primer
tcagactcgcgagtctgag

SEQ ID NO: 14615 - DNA, 19 bp, Artificial sequence
  Primer
acagactcgcgagtctgta

SEQ ID NO: 14616 - DNA, 19 bp, Artificial sequence
  Primer
acagactcgcgagtctgtt

SEQ ID NO: 14617 - DNA, 19 bp, Artificial sequence
  Primer
acagactcgcgagtctgtc

SEQ ID NO: 14618 - DNA, 19 bp, Artificial sequence
  Primer
acagactcgcgagtctgtg

SEQ ID NO: 14619 - DNA, 19 bp, Artificial sequence
  Primer
gcagactcgcgagtctgct

SEQ ID NO: 14620 - DNA, 19 bp, Artificial sequence
  Primer
gcagactcgcgagtctgcc

SEQ ID NO: 14621 - DNA, 19 bp, Artificial sequence
  Primer
gcagactcgcgagtctgcg

SEQ ID NO: 14622 - DNA, 19 bp, Artificial sequence
  Primer
ccagactcgcgagtctgga

SEQ ID NO: 14623 - DNA, 19 bp, Artificial sequence
  Primer
ccagactcgcgagtctggt

SEQ ID NO: 14624 - DNA, 19 bp, Artificial sequence
  Primer
ccagactcgcgagtctggc

SEQ ID NO: 14625 - DNA, 19 bp, Artificial sequence
  Primer
ccagactcgcgagtctggg

SEQ ID NO: 14626 - DNA, 19 bp, Artificial sequence
  Primer
tctgactcgcgagtcagaa

SEQ ID NO: 14627 - DNA, 19 bp, Artificial sequence
  Primer
tctgactcgcgagtcagat

SEQ ID NO: 14628 - DNA, 19 bp, Artificial sequence
  Primer
tctgactcgcgagtcagac

SEQ ID NO: 14629 - DNA, 19 bp, Artificial sequence
  Primer
tctgactcgcgagtcagag

SEQ ID NO: 14630 - DNA, 19 bp, Artificial sequence
  Primer
actgactcgcgagtcagta

SEQ ID NO: 14631 - DNA, 19 bp, Artificial sequence
  Primer
actgactcgcgagtcagtt

SEQ ID NO: 14632 - DNA, 19 bp, Artificial sequence
  Primer
actgactcgcgagtcagtc

SEQ ID NO: 14633 - DNA, 19 bp, Artificial sequence
  Primer
actgactcgcgagtcagtg

SEQ ID NO: 14634 - DNA, 19 bp, Artificial sequence
  Primer
gctgactcgcgagtcagca

SEQ ID NO: 14635 - DNA, 19 bp, Artificial sequence
  Primer
gctgactcgcgagtcagcc

SEQ ID NO: 14636 - DNA, 19 bp, Artificial sequence
  Primer
gctgactcgcgagtcagcg

SEQ ID NO: 14637 - DNA, 19 bp, Artificial sequence
  Primer
cctgactcgcgagtcagga

SEQ ID NO: 14638 - DNA, 19 bp, Artificial sequence
  Primer
cctgactcgcgagtcaggt

SEQ ID NO: 14639 - DNA, 19 bp, Artificial sequence
  Primer
cctgactcgcgagtcaggc

SEQ ID NO: 14640 - DNA, 19 bp, Artificial sequence
  Primer
cctgactcgcgagtcaggg

SEQ ID NO: 14641 - DNA, 19 bp, Artificial sequence
  Primer
tacgactcgcgagtcgtaa

SEQ ID NO: 14642 - DNA, 19 bp, Artificial sequence
  Primer
tacgactcgcgagtcgtat

SEQ ID NO: 14643 - DNA, 19 bp, Artificial sequence
  Primer
tacgactcgcgagtcgtag

SEQ ID NO: 14644 - DNA, 19 bp, Artificial sequence
  Primer
aacgactcgcgagtcgtta

SEQ ID NO: 14645 - DNA, 19 bp, Artificial sequence
  Primer
aacgactcgcgagtcgttt

SEQ ID NO: 14646 - DNA, 19 bp, Artificial sequence
  Primer
aacgactcgcgagtcgttc

SEQ ID NO: 14647 - DNA, 19 bp, Artificial sequence
  Primer
aacgactcgcgagtcgttg

SEQ ID NO: 14648 - DNA, 19 bp, Artificial sequence
  Primer
gacgactcgcgagtcgtca

SEQ ID NO: 14649 - DNA, 19 bp, Artificial sequence
  Primer
gacgactcgcgagtcgtct

SEQ ID NO: 14650 - DNA, 19 bp, Artificial sequence
  Primer
gacgactcgcgagtcgtcc

SEQ ID NO: 14651 - DNA, 19 bp, Artificial sequence
  Primer
gacgactcgcgagtcgtcg

SEQ ID NO: 14652 - DNA, 19 bp, Artificial sequence
  Primer
cacgactcgcgagtcgtga

SEQ ID NO: 14653 - DNA, 19 bp, Artificial sequence
  Primer
cacgactcgcgagtcgtgt

SEQ ID NO: 14654 - DNA, 19 bp, Artificial sequence
  Primer
cacgactcgcgagtcgtgc

SEQ ID NO: 14655 - DNA, 19 bp, Artificial sequence
  Primer
cacgactcgcgagtcgtgg

SEQ ID NO: 14656 - DNA, 19 bp, Artificial sequence
  Primer
tccgactcgcgagtcggaa

SEQ ID NO: 14657 - DNA, 19 bp, Artificial sequence
  Primer
tccgactcgcgagtcggat

SEQ ID NO: 14658 - DNA, 19 bp, Artificial sequence
  Primer
tccgactcgcgagtcggac

SEQ ID NO: 14659 - DNA, 19 bp, Artificial sequence
  Primer
tccgactcgcgagtcggag

SEQ ID NO: 14660 - DNA, 19 bp, Artificial sequence
  Primer
accgactcgcgagtcggta

SEQ ID NO: 14661 - DNA, 19 bp, Artificial sequence
  Primer
accgactcgcgagtcggtt

SEQ ID NO: 14662 - DNA, 19 bp, Artificial sequence
  Primer
accgactcgcgagtcggtc

SEQ ID NO: 14663 - DNA, 19 bp, Artificial sequence
  Primer
accgactcgcgagtcggtg

SEQ ID NO: 14664 - DNA, 19 bp, Artificial sequence
  Primer
gccgactcgcgagtcggca

SEQ ID NO: 14665 - DNA, 19 bp, Artificial sequence
  Primer
gccgactcgcgagtcggct

SEQ ID NO: 14666 - DNA, 19 bp, Artificial sequence
  Primer
gccgactcgcgagtcggcg

SEQ ID NO: 14667 - DNA, 19 bp, Artificial sequence
  Primer
cccgactcgcgagtcggga

SEQ ID NO: 14668 - DNA, 19 bp, Artificial sequence
  Primer
cccgactcgcgagtcgggt

SEQ ID NO: 14669 - DNA, 19 bp, Artificial sequence
  Primer
cccgactcgcgagtcgggc

SEQ ID NO: 14670 - DNA, 19 bp, Artificial sequence
  Primer
tgagactcgcgagtctcaa

SEQ ID NO: 14671 - DNA, 19 bp, Artificial sequence
  Primer
tgagactcgcgagtctcat

SEQ ID NO: 14672 - DNA, 19 bp, Artificial sequence
  Primer
tgagactcgcgagtctcac

SEQ ID NO: 14673 - DNA, 19 bp, Artificial sequence
  Primer
tgagactcgcgagtctcag

SEQ ID NO: 14674 - DNA, 19 bp, Artificial sequence
  Primer
agagactcgcgagtctcta

SEQ ID NO: 14675 - DNA, 19 bp, Artificial sequence
  Primer
agagactcgcgagtctctt

SEQ ID NO: 14676 - DNA, 19 bp, Artificial sequence
  Primer
agagactcgcgagtctctc

SEQ ID NO: 14677 - DNA, 19 bp, Artificial sequence
  Primer
agagactcgcgagtctctg

SEQ ID NO: 14678 - DNA, 19 bp, Artificial sequence
  Primer
ggagactcgcgagtctcca

SEQ ID NO: 14679 - DNA, 19 bp, Artificial sequence
  Primer
ggagactcgcgagtctcct

SEQ ID NO: 14680 - DNA, 19 bp, Artificial sequence
  Primer
ggagactcgcgagtctccc

SEQ ID NO: 14681 - DNA, 19 bp, Artificial sequence
  Primer
ggagactcgcgagtctccg

SEQ ID NO: 14682 - DNA, 19 bp, Artificial sequence
  Primer
cgagactcgcgagtctcgt

SEQ ID NO: 14683 - DNA, 19 bp, Artificial sequence
  Primer
cgagactcgcgagtctcgc

SEQ ID NO: 14684 - DNA, 19 bp, Artificial sequence
  Primer
cgagactcgcgagtctcgg

SEQ ID NO: 14685 - DNA, 19 bp, Artificial sequence
  Primer
tgtgactcgcgagtcacaa

SEQ ID NO: 14686 - DNA, 19 bp, Artificial sequence
  Primer
tgtgactcgcgagtcacat

SEQ ID NO: 14687 - DNA, 19 bp, Artificial sequence
  Primer
tgtgactcgcgagtcacac

SEQ ID NO: 14688 - DNA, 19 bp, Artificial sequence
  Primer
tgtgactcgcgagtcacag

SEQ ID NO: 14689 - DNA, 19 bp, Artificial sequence
  Primer
agtgactcgcgagtcacta

SEQ ID NO: 14690 - DNA, 19 bp, Artificial sequence
  Primer
agtgactcgcgagtcactt

SEQ ID NO: 14691 - DNA, 19 bp, Artificial sequence
  Primer
agtgactcgcgagtcactc

SEQ ID NO: 14692 - DNA, 19 bp, Artificial sequence
  Primer
agtgactcgcgagtcactg

SEQ ID NO: 14693 - DNA, 19 bp, Artificial sequence
  Primer
ggtgactcgcgagtcacca

SEQ ID NO: 14694 - DNA, 19 bp, Artificial sequence
  Primer
ggtgactcgcgagtcacct

SEQ ID NO: 14695 - DNA, 19 bp, Artificial sequence
  Primer
ggtgactcgcgagtcaccc

SEQ ID NO: 14696 - DNA, 19 bp, Artificial sequence
  Primer
ggtgactcgcgagtcaccg

SEQ ID NO: 14697 - DNA, 19 bp, Artificial sequence
  Primer
cgtgactcgcgagtcacga

SEQ ID NO: 14698 - DNA, 19 bp, Artificial sequence
  Primer
cgtgactcgcgagtcacgc

SEQ ID NO: 14699 - DNA, 19 bp, Artificial sequence
  Primer
cgtgactcgcgagtcacgg

SEQ ID NO: 14700 - DNA, 19 bp, Artificial sequence
  Primer
taggactcgcgagtcctaa

SEQ ID NO: 14701 - DNA, 19 bp, Artificial sequence
  Primer
taggactcgcgagtcctat

SEQ ID NO: 14702 - DNA, 19 bp, Artificial sequence
  Primer
taggactcgcgagtcctac

SEQ ID NO: 14703 - DNA, 19 bp, Artificial sequence
  Primer
aaggactcgcgagtcctta

SEQ ID NO: 14704 - DNA, 19 bp, Artificial sequence
  Primer
aaggactcgcgagtccttt

SEQ ID NO: 14705 - DNA, 19 bp, Artificial sequence
  Primer
aaggactcgcgagtccttc

SEQ ID NO: 14706 - DNA, 19 bp, Artificial sequence
  Primer
aaggactcgcgagtccttg

SEQ ID NO: 14707 - DNA, 19 bp, Artificial sequence
  Primer
gaggactcgcgagtcctca

SEQ ID NO: 14708 - DNA, 19 bp, Artificial sequence
  Primer
gaggactcgcgagtcctct

SEQ ID NO: 14709 - DNA, 19 bp, Artificial sequence
  Primer
gaggactcgcgagtcctcc

SEQ ID NO: 14710 - DNA, 19 bp, Artificial sequence
  Primer
gaggactcgcgagtcctcg

SEQ ID NO: 14711 - DNA, 19 bp, Artificial sequence
  Primer
caggactcgcgagtcctga

SEQ ID NO: 14712 - DNA, 19 bp, Artificial sequence
  Primer
caggactcgcgagtcctgt

SEQ ID NO: 14713 - DNA, 19 bp, Artificial sequence
  Primer
caggactcgcgagtcctgc

SEQ ID NO: 14714 - DNA, 19 bp, Artificial sequence
  Primer
caggactcgcgagtcctgg

SEQ ID NO: 14715 - DNA, 19 bp, Artificial sequence
  Primer
ttggactcgcgagtccaaa

SEQ ID NO: 14716 - DNA, 19 bp, Artificial sequence
  Primer
ttggactcgcgagtccaat

SEQ ID NO: 14717 - DNA, 19 bp, Artificial sequence
  Primer
ttggactcgcgagtccaac

SEQ ID NO: 14718 - DNA, 19 bp, Artificial sequence
  Primer
ttggactcgcgagtccaag

SEQ ID NO: 14719 - DNA, 19 bp, Artificial sequence
  Primer
atggactcgcgagtccata

SEQ ID NO: 14720 - DNA, 19 bp, Artificial sequence
  Primer
atggactcgcgagtccatt

SEQ ID NO: 14721 - DNA, 19 bp, Artificial sequence
  Primer
atggactcgcgagtccatc

SEQ ID NO: 14722 - DNA, 19 bp, Artificial sequence
  Primer
gtggactcgcgagtccaca

SEQ ID NO: 14723 - DNA, 19 bp, Artificial sequence
  Primer
gtggactcgcgagtccact

SEQ ID NO: 14724 - DNA, 19 bp, Artificial sequence
  Primer
gtggactcgcgagtccacc

SEQ ID NO: 14725 - DNA, 19 bp, Artificial sequence
  Primer
gtggactcgcgagtccacg

SEQ ID NO: 14726 - DNA, 19 bp, Artificial sequence
  Primer
ctggactcgcgagtccaga

SEQ ID NO: 14727 - DNA, 19 bp, Artificial sequence
  Primer
ctggactcgcgagtccagt

SEQ ID NO: 14728 - DNA, 19 bp, Artificial sequence
  Primer
ctggactcgcgagtccagc

SEQ ID NO: 14729 - DNA, 19 bp, Artificial sequence
  Primer
ctggactcgcgagtccagg

SEQ ID NO: 14730 - DNA, 19 bp, Artificial sequence
  Primer
tgggactcgcgagtcccaa

SEQ ID NO: 14731 - DNA, 19 bp, Artificial sequence
  Primer
tgggactcgcgagtcccat

SEQ ID NO: 14732 - DNA, 19 bp, Artificial sequence
  Primer
tgggactcgcgagtcccac

SEQ ID NO: 14733 - DNA, 19 bp, Artificial sequence
  Primer
tgggactcgcgagtcccag

SEQ ID NO: 14734 - DNA, 19 bp, Artificial sequence
  Primer
agggactcgcgagtcccta

SEQ ID NO: 14735 - DNA, 19 bp, Artificial sequence
  Primer
agggactcgcgagtccctt

SEQ ID NO: 14736 - DNA, 19 bp, Artificial sequence
  Primer
agggactcgcgagtccctc

SEQ ID NO: 14737 - DNA, 19 bp, Artificial sequence
  Primer
agggactcgcgagtccctg

SEQ ID NO: 14738 - DNA, 19 bp, Artificial sequence
  Primer
ggggactcgcgagtcccca

SEQ ID NO: 14739 - DNA, 19 bp, Artificial sequence
  Primer
ggggactcgcgagtcccct

SEQ ID NO: 14740 - DNA, 19 bp, Artificial sequence
  Primer
ggggactcgcgagtccccg

SEQ ID NO: 14741 - DNA, 19 bp, Artificial sequence
  Primer
cgggactcgcgagtcccga

SEQ ID NO: 14742 - DNA, 19 bp, Artificial sequence
  Primer
cgggactcgcgagtcccgt

SEQ ID NO: 14743 - DNA, 19 bp, Artificial sequence
  Primer
cgggactcgcgagtcccgc

SEQ ID NO: 14744 - DNA, 19 bp, Artificial sequence
  Primer
aaagactcgcgagtcttta

SEQ ID NO: 14745 - DNA, 19 bp, Artificial sequence
  Primer
aaagactcgcgagtctttt

SEQ ID NO: 14746 - DNA, 19 bp, Artificial sequence
  Primer
aaagactcgcgagtctttc

SEQ ID NO: 14747 - DNA, 19 bp, Artificial sequence
  Primer
aaagactcgcgagtctttg

SEQ ID NO: 14748 - DNA, 19 bp, Artificial sequence
  Primer
gaagactcgcgagtcttca

SEQ ID NO: 14749 - DNA, 19 bp, Artificial sequence
  Primer
gaagactcgcgagtcttct

SEQ ID NO: 14750 - DNA, 19 bp, Artificial sequence
  Primer
gaagactcgcgagtcttcc

SEQ ID NO: 14751 - DNA, 19 bp, Artificial sequence
  Primer
gaagactcgcgagtcttcg

SEQ ID NO: 14752 - DNA, 19 bp, Artificial sequence
  Primer
caagactcgcgagtcttga

SEQ ID NO: 14753 - DNA, 19 bp, Artificial sequence
  Primer
caagactcgcgagtcttgt

SEQ ID NO: 14754 - DNA, 19 bp, Artificial sequence
  Primer
caagactcgcgagtcttgc

SEQ ID NO: 14755 - DNA, 19 bp, Artificial sequence
  Primer
caagactcgcgagtcttgg

SEQ ID NO: 14756 - DNA, 19 bp, Artificial sequence
  Primer
tttgactcgcgagtcaaaa

SEQ ID NO: 14757 - DNA, 19 bp, Artificial sequence
  Primer
tttgactcgcgagtcaaat

SEQ ID NO: 14758 - DNA, 19 bp, Artificial sequence
  Primer
tttgactcgcgagtcaaac

SEQ ID NO: 14759 - DNA, 19 bp, Artificial sequence
  Primer
tttgactcgcgagtcaaag

SEQ ID NO: 14760 - DNA, 19 bp, Artificial sequence
  Primer
attgactcgcgagtcaata

SEQ ID NO: 14761 - DNA, 19 bp, Artificial sequence
  Primer
attgactcgcgagtcaatc

SEQ ID NO: 14762 - DNA, 19 bp, Artificial sequence
  Primer
attgactcgcgagtcaatg

SEQ ID NO: 14763 - DNA, 19 bp, Artificial sequence
  Primer
gttgactcgcgagtcaaca

SEQ ID NO: 14764 - DNA, 19 bp, Artificial sequence
  Primer
gttgactcgcgagtcaact

SEQ ID NO: 14765 - DNA, 19 bp, Artificial sequence
  Primer
gttgactcgcgagtcaacc

SEQ ID NO: 14766 - DNA, 19 bp, Artificial sequence
  Primer
gttgactcgcgagtcaacg

SEQ ID NO: 14767 - DNA, 19 bp, Artificial sequence
  Primer
cttgactcgcgagtcaaga

SEQ ID NO: 14768 - DNA, 19 bp, Artificial sequence
  Primer
cttgactcgcgagtcaagt

SEQ ID NO: 14769 - DNA, 19 bp, Artificial sequence
  Primer
cttgactcgcgagtcaagc

SEQ ID NO: 14770 - DNA, 19 bp, Artificial sequence
  Primer
cttgactcgcgagtcaagg

SEQ ID NO: 14771 - DNA, 19 bp, Artificial sequence
  Primer
aatgactcgcgagtcatta

SEQ ID NO: 14772 - DNA, 19 bp, Artificial sequence
  Primer
aatgactcgcgagtcattt

SEQ ID NO: 14773 - DNA, 19 bp, Artificial sequence
  Primer
aatgactcgcgagtcattc

SEQ ID NO: 14774 - DNA, 19 bp, Artificial sequence
  Primer
aatgactcgcgagtcattg

SEQ ID NO: 14775 - DNA, 19 bp, Artificial sequence
  Primer
gatgactcgcgagtcatca

SEQ ID NO: 14776 - DNA, 19 bp, Artificial sequence
  Primer
gatgactcgcgagtcatct

SEQ ID NO: 14777 - DNA, 19 bp, Artificial sequence
  Primer
gatgactcgcgagtcatcc

SEQ ID NO: 14778 - DNA, 19 bp, Artificial sequence
  Primer
gatgactcgcgagtcatcg

SEQ ID NO: 14779 - DNA, 19 bp, Artificial sequence
  Primer
catgactcgcgagtcatga

SEQ ID NO: 14780 - DNA, 19 bp, Artificial sequence
  Primer
catgactcgcgagtcatgt

SEQ ID NO: 14781 - DNA, 19 bp, Artificial sequence
  Primer
catgactcgcgagtcatgc

SEQ ID NO: 14782 - DNA, 19 bp, Artificial sequence
  Primer
catgactcgcgagtcatgg

SEQ ID NO: 14783 - DNA, 19 bp, Artificial sequence
  Primer
gtagactcgcgagtctaca

SEQ ID NO: 14784 - DNA, 19 bp, Artificial sequence
  Primer
gtagactcgcgagtctact

SEQ ID NO: 14785 - DNA, 19 bp, Artificial sequence
  Primer
gtagactcgcgagtctacc

SEQ ID NO: 14786 - DNA, 19 bp, Artificial sequence
  Primer
gtagactcgcgagtctacg

SEQ ID NO: 14787 - DNA, 19 bp, Artificial sequence
  Primer
ctagactcgcgagtctaga

SEQ ID NO: 14788 - DNA, 19 bp, Artificial sequence
  Primer
ctagactcgcgagtctagt

SEQ ID NO: 14789 - DNA, 19 bp, Artificial sequence
  Primer
ctagactcgcgagtctagc

SEQ ID NO: 14790 - DNA, 19 bp, Artificial sequence
  Primer
ctagactcgcgagtctagg

SEQ ID NO: 14791 - DNA, 19 bp, Artificial sequence
  Primer
tcagactccggagtctgaa

SEQ ID NO: 14792 - DNA, 19 bp, Artificial sequence
  Primer
tcagactccggagtctgat

SEQ ID NO: 14793 - DNA, 19 bp, Artificial sequence
  Primer
tcagactccggagtctgac

SEQ ID NO: 14794 - DNA, 19 bp, Artificial sequence
  Primer
tcagactccggagtctgag

SEQ ID NO: 14795 - DNA, 19 bp, Artificial sequence
  Primer
acagactccggagtctgta

SEQ ID NO: 14796 - DNA, 19 bp, Artificial sequence
  Primer
acagactccggagtctgtt

SEQ ID NO: 14797 - DNA, 19 bp, Artificial sequence
  Primer
acagactccggagtctgtc

SEQ ID NO: 14798 - DNA, 19 bp, Artificial sequence
  Primer
acagactccggagtctgtg

SEQ ID NO: 14799 - DNA, 19 bp, Artificial sequence
  Primer
gcagactccggagtctgct

SEQ ID NO: 14800 - DNA, 19 bp, Artificial sequence
  Primer
gcagactccggagtctgcc

SEQ ID NO: 14801 - DNA, 19 bp, Artificial sequence
  Primer
gcagactccggagtctgcg

SEQ ID NO: 14802 - DNA, 19 bp, Artificial sequence
  Primer
ccagactccggagtctgga

SEQ ID NO: 14803 - DNA, 19 bp, Artificial sequence
  Primer
ccagactccggagtctggt

SEQ ID NO: 14804 - DNA, 19 bp, Artificial sequence
  Primer
ccagactccggagtctggc

SEQ ID NO: 14805 - DNA, 19 bp, Artificial sequence
  Primer
ccagactccggagtctggg

SEQ ID NO: 14806 - DNA, 19 bp, Artificial sequence
  Primer
tctgactccggagtcagaa

SEQ ID NO: 14807 - DNA, 19 bp, Artificial sequence
  Primer
tctgactccggagtcagat

SEQ ID NO: 14808 - DNA, 19 bp, Artificial sequence
  Primer
tctgactccggagtcagac

SEQ ID NO: 14809 - DNA, 19 bp, Artificial sequence
  Primer
tctgactccggagtcagag

SEQ ID NO: 14810 - DNA, 19 bp, Artificial sequence
  Primer
actgactccggagtcagta

SEQ ID NO: 14811 - DNA, 19 bp, Artificial sequence
  Primer
actgactccggagtcagtt

SEQ ID NO: 14812 - DNA, 19 bp, Artificial sequence
  Primer
actgactccggagtcagtc

SEQ ID NO: 14813 - DNA, 19 bp, Artificial sequence
  Primer
actgactccggagtcagtg

SEQ ID NO: 14814 - DNA, 19 bp, Artificial sequence
  Primer
gctgactccggagtcagca

SEQ ID NO: 14815 - DNA, 19 bp, Artificial sequence
  Primer
gctgactccggagtcagcc

SEQ ID NO: 14816 - DNA, 19 bp, Artificial sequence
  Primer
gctgactccggagtcagcg

SEQ ID NO: 14817 - DNA, 19 bp, Artificial sequence
  Primer
cctgactccggagtcagga

SEQ ID NO: 14818 - DNA, 19 bp, Artificial sequence
  Primer
cctgactccggagtcaggt

SEQ ID NO: 14819 - DNA, 19 bp, Artificial sequence
  Primer
cctgactccggagtcaggc

SEQ ID NO: 14820 - DNA, 19 bp, Artificial sequence
  Primer
cctgactccggagtcaggg

SEQ ID NO: 14821 - DNA, 19 bp, Artificial sequence
  Primer
tacgactccggagtcgtaa

SEQ ID NO: 14822 - DNA, 19 bp, Artificial sequence
  Primer
tacgactccggagtcgtat

SEQ ID NO: 14823 - DNA, 19 bp, Artificial sequence
  Primer
tacgactccggagtcgtag

SEQ ID NO: 14824 - DNA, 19 bp, Artificial sequence
  Primer
aacgactccggagtcgtta

SEQ ID NO: 14825 - DNA, 19 bp, Artificial sequence
  Primer
aacgactccggagtcgttt

SEQ ID NO: 14826 - DNA, 19 bp, Artificial sequence
  Primer
aacgactccggagtcgttc

SEQ ID NO: 14827 - DNA, 19 bp, Artificial sequence
  Primer
aacgactccggagtcgttg

SEQ ID NO: 14828 - DNA, 19 bp, Artificial sequence
  Primer
gacgactccggagtcgtca

SEQ ID NO: 14829 - DNA, 19 bp, Artificial sequence
  Primer
gacgactccggagtcgtct

SEQ ID NO: 14830 - DNA, 19 bp, Artificial sequence
  Primer
gacgactccggagtcgtcc

SEQ ID NO: 14831 - DNA, 19 bp, Artificial sequence
  Primer
gacgactccggagtcgtcg

SEQ ID NO: 14832 - DNA, 19 bp, Artificial sequence
  Primer
cacgactccggagtcgtga

SEQ ID NO: 14833 - DNA, 19 bp, Artificial sequence
  Primer
cacgactccggagtcgtgt

SEQ ID NO: 14834 - DNA, 19 bp, Artificial sequence
  Primer
cacgactccggagtcgtgc

SEQ ID NO: 14835 - DNA, 19 bp, Artificial sequence
  Primer
cacgactccggagtcgtgg

SEQ ID NO: 14836 - DNA, 19 bp, Artificial sequence
  Primer
tccgactccggagtcggaa

SEQ ID NO: 14837 - DNA, 19 bp, Artificial sequence
  Primer
tccgactccggagtcggat

SEQ ID NO: 14838 - DNA, 19 bp, Artificial sequence
  Primer
tccgactccggagtcggac

SEQ ID NO: 14839 - DNA, 19 bp, Artificial sequence
  Primer
tccgactccggagtcggag

SEQ ID NO: 14840 - DNA, 19 bp, Artificial sequence
  Primer
accgactccggagtcggta

SEQ ID NO: 14841 - DNA, 19 bp, Artificial sequence
  Primer
accgactccggagtcggtt

SEQ ID NO: 14842 - DNA, 19 bp, Artificial sequence
  Primer
accgactccggagtcggtc

SEQ ID NO: 14843 - DNA, 19 bp, Artificial sequence
  Primer
accgactccggagtcggtg

SEQ ID NO: 14844 - DNA, 19 bp, Artificial sequence
  Primer
gccgactccggagtcggca

SEQ ID NO: 14845 - DNA, 19 bp, Artificial sequence
  Primer
gccgactccggagtcggct

SEQ ID NO: 14846 - DNA, 19 bp, Artificial sequence
  Primer
gccgactccggagtcggcg

SEQ ID NO: 14847 - DNA, 19 bp, Artificial sequence
  Primer
cccgactccggagtcggga

SEQ ID NO: 14848 - DNA, 19 bp, Artificial sequence
  Primer
cccgactccggagtcgggt

SEQ ID NO: 14849 - DNA, 19 bp, Artificial sequence
  Primer
cccgactccggagtcgggc

SEQ ID NO: 14850 - DNA, 19 bp, Artificial sequence
  Primer
tgagactccggagtctcaa

SEQ ID NO: 14851 - DNA, 19 bp, Artificial sequence
  Primer
tgagactccggagtctcat

SEQ ID NO: 14852 - DNA, 19 bp, Artificial sequence
  Primer
tgagactccggagtctcac

SEQ ID NO: 14853 - DNA, 19 bp, Artificial sequence
  Primer
tgagactccggagtctcag

SEQ ID NO: 14854 - DNA, 19 bp, Artificial sequence
  Primer
agagactccggagtctcta

SEQ ID NO: 14855 - DNA, 19 bp, Artificial sequence
  Primer
agagactccggagtctctt

SEQ ID NO: 14856 - DNA, 19 bp, Artificial sequence
  Primer
agagactccggagtctctc

SEQ ID NO: 14857 - DNA, 19 bp, Artificial sequence
  Primer
agagactccggagtctctg

SEQ ID NO: 14858 - DNA, 19 bp, Artificial sequence
  Primer
ggagactccggagtctcca

SEQ ID NO: 14859 - DNA, 19 bp, Artificial sequence
  Primer
ggagactccggagtctcct

SEQ ID NO: 14860 - DNA, 19 bp, Artificial sequence
  Primer
ggagactccggagtctccc

SEQ ID NO: 14861 - DNA, 19 bp, Artificial sequence
  Primer
ggagactccggagtctccg

SEQ ID NO: 14862 - DNA, 19 bp, Artificial sequence
  Primer
cgagactccggagtctcgt

SEQ ID NO: 14863 - DNA, 19 bp, Artificial sequence
  Primer
cgagactccggagtctcgc

SEQ ID NO: 14864 - DNA, 19 bp, Artificial sequence
  Primer
cgagactccggagtctcgg

SEQ ID NO: 14865 - DNA, 19 bp, Artificial sequence
  Primer
tgtgactccggagtcacaa

SEQ ID NO: 14866 - DNA, 19 bp, Artificial sequence
  Primer
tgtgactccggagtcacat

SEQ ID NO: 14867 - DNA, 19 bp, Artificial sequence
  Primer
tgtgactccggagtcacac

SEQ ID NO: 14868 - DNA, 19 bp, Artificial sequence
  Primer
tgtgactccggagtcacag

SEQ ID NO: 14869 - DNA, 19 bp, Artificial sequence
  Primer
agtgactccggagtcacta

SEQ ID NO: 14870 - DNA, 19 bp, Artificial sequence
  Primer
agtgactccggagtcactt

SEQ ID NO: 14871 - DNA, 19 bp, Artificial sequence
  Primer
agtgactccggagtcactc

SEQ ID NO: 14872 - DNA, 19 bp, Artificial sequence
  Primer
agtgactccggagtcactg

SEQ ID NO: 14873 - DNA, 19 bp, Artificial sequence
  Primer
ggtgactccggagtcacca

SEQ ID NO: 14874 - DNA, 19 bp, Artificial sequence
  Primer
ggtgactccggagtcacct

SEQ ID NO: 14875 - DNA, 19 bp, Artificial sequence
  Primer
ggtgactccggagtcaccc

SEQ ID NO: 14876 - DNA, 19 bp, Artificial sequence
  Primer
ggtgactccggagtcaccg

SEQ ID NO: 14877 - DNA, 19 bp, Artificial sequence
  Primer
cgtgactccggagtcacga

SEQ ID NO: 14878 - DNA, 19 bp, Artificial sequence
  Primer
cgtgactccggagtcacgc

SEQ ID NO: 14879 - DNA, 19 bp, Artificial sequence
  Primer
cgtgactccggagtcacgg

SEQ ID NO: 14880 - DNA, 19 bp, Artificial sequence
  Primer
taggactccggagtcctaa

SEQ ID NO: 14881 - DNA, 19 bp, Artificial sequence
  Primer
taggactccggagtcctat

SEQ ID NO: 14882 - DNA, 19 bp, Artificial sequence
  Primer
taggactccggagtcctac

SEQ ID NO: 14883 - DNA, 19 bp, Artificial sequence
  Primer
aaggactccggagtcctta

SEQ ID NO: 14884 - DNA, 19 bp, Artificial sequence
  Primer
aaggactccggagtccttt

SEQ ID NO: 14885 - DNA, 19 bp, Artificial sequence
  Primer
aaggactccggagtccttc

SEQ ID NO: 14886 - DNA, 19 bp, Artificial sequence
  Primer
aaggactccggagtccttg

SEQ ID NO: 14887 - DNA, 19 bp, Artificial sequence
  Primer
gaggactccggagtcctca

SEQ ID NO: 14888 - DNA, 19 bp, Artificial sequence
  Primer
gaggactccggagtcctct

SEQ ID NO: 14889 - DNA, 19 bp, Artificial sequence
  Primer
gaggactccggagtcctcc

SEQ ID NO: 14890 - DNA, 19 bp, Artificial sequence
  Primer
gaggactccggagtcctcg

SEQ ID NO: 14891 - DNA, 19 bp, Artificial sequence
  Primer
caggactccggagtcctga

SEQ ID NO: 14892 - DNA, 19 bp, Artificial sequence
  Primer
caggactccggagtcctgt

SEQ ID NO: 14893 - DNA, 19 bp, Artificial sequence
  Primer
caggactccggagtcctgc

SEQ ID NO: 14894 - DNA, 19 bp, Artificial sequence
  Primer
caggactccggagtcctgg

SEQ ID NO: 14895 - DNA, 19 bp, Artificial sequence
  Primer
ttggactccggagtccaaa

SEQ ID NO: 14896 - DNA, 19 bp, Artificial sequence
  Primer
ttggactccggagtccaat

SEQ ID NO: 14897 - DNA, 19 bp, Artificial sequence
  Primer
ttggactccggagtccaac

SEQ ID NO: 14898 - DNA, 19 bp, Artificial sequence
  Primer
ttggactccggagtccaag

SEQ ID NO: 14899 - DNA, 19 bp, Artificial sequence
  Primer
atggactccggagtccata

SEQ ID NO: 14900 - DNA, 19 bp, Artificial sequence
  Primer
atggactccggagtccatt

SEQ ID NO: 14901 - DNA, 19 bp, Artificial sequence
  Primer
atggactccggagtccatc

SEQ ID NO: 14902 - DNA, 19 bp, Artificial sequence
  Primer
gtggactccggagtccaca

SEQ ID NO: 14903 - DNA, 19 bp, Artificial sequence
  Primer
gtggactccggagtccact

SEQ ID NO: 14904 - DNA, 19 bp, Artificial sequence
  Primer
gtggactccggagtccacc

SEQ ID NO: 14905 - DNA, 19 bp, Artificial sequence
  Primer
gtggactccggagtccacg

SEQ ID NO: 14906 - DNA, 19 bp, Artificial sequence
  Primer
ctggactccggagtccaga

SEQ ID NO: 14907 - DNA, 19 bp, Artificial sequence
  Primer
ctggactccggagtccagt

SEQ ID NO: 14908 - DNA, 19 bp, Artificial sequence
  Primer
ctggactccggagtccagc

SEQ ID NO: 14909 - DNA, 19 bp, Artificial sequence
  Primer
ctggactccggagtccagg

SEQ ID NO: 14910 - DNA, 19 bp, Artificial sequence
  Primer
tgggactccggagtcccaa

SEQ ID NO: 14911 - DNA, 19 bp, Artificial sequence
  Primer
tgggactccggagtcccat

SEQ ID NO: 14912 - DNA, 19 bp, Artificial sequence
  Primer
tgggactccggagtcccac

SEQ ID NO: 14913 - DNA, 19 bp, Artificial sequence
  Primer
tgggactccggagtcccag

SEQ ID NO: 14914 - DNA, 19 bp, Artificial sequence
  Primer
agggactccggagtcccta

SEQ ID NO: 14915 - DNA, 19 bp, Artificial sequence
  Primer
agggactccggagtccctt

SEQ ID NO: 14916 - DNA, 19 bp, Artificial sequence
  Primer
agggactccggagtccctc

SEQ ID NO: 14917 - DNA, 19 bp, Artificial sequence
  Primer
agggactccggagtccctg

SEQ ID NO: 14918 - DNA, 19 bp, Artificial sequence
  Primer
ggggactccggagtcccca

SEQ ID NO: 14919 - DNA, 19 bp, Artificial sequence
  Primer
ggggactccggagtcccct

SEQ ID NO: 14920 - DNA, 19 bp, Artificial sequence
  Primer
ggggactccggagtccccg

SEQ ID NO: 14921 - DNA, 19 bp, Artificial sequence
  Primer
cgggactccggagtcccga

SEQ ID NO: 14922 - DNA, 19 bp, Artificial sequence
  Primer
cgggactccggagtcccgt

SEQ ID NO: 14923 - DNA, 19 bp, Artificial sequence
  Primer
cgggactccggagtcccgc

SEQ ID NO: 14924 - DNA, 19 bp, Artificial sequence
  Primer
gaagactccggagtcttca

SEQ ID NO: 14925 - DNA, 19 bp, Artificial sequence
  Primer
gaagactccggagtcttct

SEQ ID NO: 14926 - DNA, 19 bp, Artificial sequence
  Primer
gaagactccggagtcttcc

SEQ ID NO: 14927 - DNA, 19 bp, Artificial sequence
  Primer
gaagactccggagtcttcg

SEQ ID NO: 14928 - DNA, 19 bp, Artificial sequence
  Primer
caagactccggagtcttga

SEQ ID NO: 14929 - DNA, 19 bp, Artificial sequence
  Primer
caagactccggagtcttgt

SEQ ID NO: 14930 - DNA, 19 bp, Artificial sequence
  Primer
caagactccggagtcttgc

SEQ ID NO: 14931 - DNA, 19 bp, Artificial sequence
  Primer
caagactccggagtcttgg

SEQ ID NO: 14932 - DNA, 19 bp, Artificial sequence
  Primer
tttgactccggagtcaaaa

SEQ ID NO: 14933 - DNA, 19 bp, Artificial sequence
  Primer
tttgactccggagtcaaat

SEQ ID NO: 14934 - DNA, 19 bp, Artificial sequence
  Primer
tttgactccggagtcaaac

SEQ ID NO: 14935 - DNA, 19 bp, Artificial sequence
  Primer
tttgactccggagtcaaag

SEQ ID NO: 14936 - DNA, 19 bp, Artificial sequence
  Primer
attgactccggagtcaata

SEQ ID NO: 14937 - DNA, 19 bp, Artificial sequence
  Primer
attgactccggagtcaatc

SEQ ID NO: 14938 - DNA, 19 bp, Artificial sequence
  Primer
attgactccggagtcaatg

SEQ ID NO: 14939 - DNA, 19 bp, Artificial sequence
  Primer
gttgactccggagtcaaca

SEQ ID NO: 14940 - DNA, 19 bp, Artificial sequence
  Primer
gttgactccggagtcaact

SEQ ID NO: 14941 - DNA, 19 bp, Artificial sequence
  Primer
gttgactccggagtcaacc

SEQ ID NO: 14942 - DNA, 19 bp, Artificial sequence
  Primer
gttgactccggagtcaacg

SEQ ID NO: 14943 - DNA, 19 bp, Artificial sequence
  Primer
cttgactccggagtcaaga

SEQ ID NO: 14944 - DNA, 19 bp, Artificial sequence
  Primer
cttgactccggagtcaagt

SEQ ID NO: 14945 - DNA, 19 bp, Artificial sequence
  Primer
cttgactccggagtcaagc

SEQ ID NO: 14946 - DNA, 19 bp, Artificial sequence
  Primer
cttgactccggagtcaagg

SEQ ID NO: 14947 - DNA, 19 bp, Artificial sequence
  Primer
aatgactccggagtcatta

SEQ ID NO: 14948 - DNA, 19 bp, Artificial sequence
  Primer
aatgactccggagtcattt

SEQ ID NO: 14949 - DNA, 19 bp, Artificial sequence
  Primer
aatgactccggagtcattc

SEQ ID NO: 14950 - DNA, 19 bp, Artificial sequence
  Primer
aatgactccggagtcattg

SEQ ID NO: 14951 - DNA, 19 bp, Artificial sequence
  Primer
gatgactccggagtcatca

SEQ ID NO: 14952 - DNA, 19 bp, Artificial sequence
  Primer
gatgactccggagtcatct

SEQ ID NO: 14953 - DNA, 19 bp, Artificial sequence
  Primer
gatgactccggagtcatcc

SEQ ID NO: 14954 - DNA, 19 bp, Artificial sequence
  Primer
gatgactccggagtcatcg

SEQ ID NO: 14955 - DNA, 19 bp, Artificial sequence
  Primer
catgactccggagtcatga

SEQ ID NO: 14956 - DNA, 19 bp, Artificial sequence
  Primer
catgactccggagtcatgt

SEQ ID NO: 14957 - DNA, 19 bp, Artificial sequence
  Primer
catgactccggagtcatgc

SEQ ID NO: 14958 - DNA, 19 bp, Artificial sequence
  Primer
catgactccggagtcatgg

SEQ ID NO: 14959 - DNA, 19 bp, Artificial sequence
  Primer
gtagactccggagtctaca

SEQ ID NO: 14960 - DNA, 19 bp, Artificial sequence
  Primer
gtagactccggagtctact

SEQ ID NO: 14961 - DNA, 19 bp, Artificial sequence
  Primer
gtagactccggagtctacc

SEQ ID NO: 14962 - DNA, 19 bp, Artificial sequence
  Primer
gtagactccggagtctacg

SEQ ID NO: 14963 - DNA, 19 bp, Artificial sequence
  Primer
ctagactccggagtctaga

SEQ ID NO: 14964 - DNA, 19 bp, Artificial sequence
  Primer
ctagactccggagtctagt

SEQ ID NO: 14965 - DNA, 19 bp, Artificial sequence
  Primer
ctagactccggagtctagc

SEQ ID NO: 14966 - DNA, 19 bp, Artificial sequence
  Primer
ctagactccggagtctagg

SEQ ID NO: 14967 - DNA, 19 bp, Artificial sequence
  Primer
gcagactcatgagtctgct

SEQ ID NO: 14968 - DNA, 19 bp, Artificial sequence
  Primer
gcagactcatgagtctgcc

SEQ ID NO: 14969 - DNA, 19 bp, Artificial sequence
  Primer
gcagactcatgagtctgcg

SEQ ID NO: 14970 - DNA, 19 bp, Artificial sequence
  Primer
ccagactcatgagtctgga

SEQ ID NO: 14971 - DNA, 19 bp, Artificial sequence
  Primer
ccagactcatgagtctggt

SEQ ID NO: 14972 - DNA, 19 bp, Artificial sequence
  Primer
ccagactcatgagtctggc

SEQ ID NO: 14973 - DNA, 19 bp, Artificial sequence
  Primer
ccagactcatgagtctggg

SEQ ID NO: 14974 - DNA, 19 bp, Artificial sequence
  Primer
gctgactcatgagtcagca

SEQ ID NO: 14975 - DNA, 19 bp, Artificial sequence
  Primer
gctgactcatgagtcagcc

SEQ ID NO: 14976 - DNA, 19 bp, Artificial sequence
  Primer
gctgactcatgagtcagcg

SEQ ID NO: 14977 - DNA, 19 bp, Artificial sequence
  Primer
cctgactcatgagtcagga

SEQ ID NO: 14978 - DNA, 19 bp, Artificial sequence
  Primer
cctgactcatgagtcaggt

SEQ ID NO: 14979 - DNA, 19 bp, Artificial sequence
  Primer
cctgactcatgagtcaggc

SEQ ID NO: 14980 - DNA, 19 bp, Artificial sequence
  Primer
cctgactcatgagtcaggg

SEQ ID NO: 14981 - DNA, 19 bp, Artificial sequence
  Primer
aacgactcatgagtcgtta

SEQ ID NO: 14982 - DNA, 19 bp, Artificial sequence
  Primer
aacgactcatgagtcgttt

SEQ ID NO: 14983 - DNA, 19 bp, Artificial sequence
  Primer
aacgactcatgagtcgttc

SEQ ID NO: 14984 - DNA, 19 bp, Artificial sequence
  Primer
aacgactcatgagtcgttg

SEQ ID NO: 14985 - DNA, 19 bp, Artificial sequence
  Primer
gacgactcatgagtcgtca

SEQ ID NO: 14986 - DNA, 19 bp, Artificial sequence
  Primer
gacgactcatgagtcgtct

SEQ ID NO: 14987 - DNA, 19 bp, Artificial sequence
  Primer
gacgactcatgagtcgtcc

SEQ ID NO: 14988 - DNA, 19 bp, Artificial sequence
  Primer
gacgactcatgagtcgtcg

SEQ ID NO: 14989 - DNA, 19 bp, Artificial sequence
  Primer
cacgactcatgagtcgtga

SEQ ID NO: 14990 - DNA, 19 bp, Artificial sequence
  Primer
cacgactcatgagtcgtgt

SEQ ID NO: 14991 - DNA, 19 bp, Artificial sequence
  Primer
cacgactcatgagtcgtgc

SEQ ID NO: 14992 - DNA, 19 bp, Artificial sequence
  Primer
cacgactcatgagtcgtgg

SEQ ID NO: 14993 - DNA, 19 bp, Artificial sequence
  Primer
tccgactcatgagtcggaa

SEQ ID NO: 14994 - DNA, 19 bp, Artificial sequence
  Primer
tccgactcatgagtcggat

SEQ ID NO: 14995 - DNA, 19 bp, Artificial sequence
  Primer
tccgactcatgagtcggac

SEQ ID NO: 14996 - DNA, 19 bp, Artificial sequence
  Primer
tccgactcatgagtcggag

SEQ ID NO: 14997 - DNA, 19 bp, Artificial sequence
  Primer
accgactcatgagtcggta

SEQ ID NO: 14998 - DNA, 19 bp, Artificial sequence
  Primer
accgactcatgagtcggtt

SEQ ID NO: 14999 - DNA, 19 bp, Artificial sequence
  Primer
accgactcatgagtcggtc

SEQ ID NO: 15000 - DNA, 19 bp, Artificial sequence
  Primer
accgactcatgagtcggtg

SEQ ID NO: 15001 - DNA, 19 bp, Artificial sequence
  Primer
gccgactcatgagtcggca

SEQ ID NO: 15002 - DNA, 19 bp, Artificial sequence
  Primer
gccgactcatgagtcggct

SEQ ID NO: 15003 - DNA, 19 bp, Artificial sequence
  Primer
gccgactcatgagtcggcg

SEQ ID NO: 15004 - DNA, 19 bp, Artificial sequence
  Primer
cccgactcatgagtcggga

SEQ ID NO: 15005 - DNA, 19 bp, Artificial sequence
  Primer
cccgactcatgagtcgggt

SEQ ID NO: 15006 - DNA, 19 bp, Artificial sequence
  Primer
cccgactcatgagtcgggc

SEQ ID NO: 15007 - DNA, 19 bp, Artificial sequence
  Primer
ggagactcatgagtctcca

SEQ ID NO: 15008 - DNA, 19 bp, Artificial sequence
  Primer
ggagactcatgagtctcct

SEQ ID NO: 15009 - DNA, 19 bp, Artificial sequence
  Primer
ggagactcatgagtctccc

SEQ ID NO: 15010 - DNA, 19 bp, Artificial sequence
  Primer
ggagactcatgagtctccg

SEQ ID NO: 15011 - DNA, 19 bp, Artificial sequence
  Primer
cgagactcatgagtctcgt

SEQ ID NO: 15012 - DNA, 19 bp, Artificial sequence
  Primer
cgagactcatgagtctcgc

SEQ ID NO: 15013 - DNA, 19 bp, Artificial sequence
  Primer
cgagactcatgagtctcgg

SEQ ID NO: 15014 - DNA, 19 bp, Artificial sequence
  Primer
ggtgactcatgagtcacca

SEQ ID NO: 15015 - DNA, 19 bp, Artificial sequence
  Primer
ggtgactcatgagtcacct

SEQ ID NO: 15016 - DNA, 19 bp, Artificial sequence
  Primer
ggtgactcatgagtcaccc

SEQ ID NO: 15017 - DNA, 19 bp, Artificial sequence
  Primer
ggtgactcatgagtcaccg

SEQ ID NO: 15018 - DNA, 19 bp, Artificial sequence
  Primer
cgtgactcatgagtcacga

SEQ ID NO: 15019 - DNA, 19 bp, Artificial sequence
  Primer
cgtgactcatgagtcacgc

SEQ ID NO: 15020 - DNA, 19 bp, Artificial sequence
  Primer
cgtgactcatgagtcacgg

SEQ ID NO: 15021 - DNA, 19 bp, Artificial sequence
  Primer
gaggactcatgagtcctca

SEQ ID NO: 15022 - DNA, 19 bp, Artificial sequence
  Primer
gaggactcatgagtcctct

SEQ ID NO: 15023 - DNA, 19 bp, Artificial sequence
  Primer
gaggactcatgagtcctcc

SEQ ID NO: 15024 - DNA, 19 bp, Artificial sequence
  Primer
gaggactcatgagtcctcg

SEQ ID NO: 15025 - DNA, 19 bp, Artificial sequence
  Primer
caggactcatgagtcctga

SEQ ID NO: 15026 - DNA, 19 bp, Artificial sequence
  Primer
caggactcatgagtcctgt

SEQ ID NO: 15027 - DNA, 19 bp, Artificial sequence
  Primer
caggactcatgagtcctgc

SEQ ID NO: 15028 - DNA, 19 bp, Artificial sequence
  Primer
caggactcatgagtcctgg

SEQ ID NO: 15029 - DNA, 19 bp, Artificial sequence
  Primer
gtggactcatgagtccaca

SEQ ID NO: 15030 - DNA, 19 bp, Artificial sequence
  Primer
gtggactcatgagtccact

SEQ ID NO: 15031 - DNA, 19 bp, Artificial sequence
  Primer
gtggactcatgagtccacc

SEQ ID NO: 15032 - DNA, 19 bp, Artificial sequence
  Primer
gtggactcatgagtccacg

SEQ ID NO: 15033 - DNA, 19 bp, Artificial sequence
  Primer
ctggactcatgagtccaga

SEQ ID NO: 15034 - DNA, 19 bp, Artificial sequence
  Primer
ctggactcatgagtccagt

SEQ ID NO: 15035 - DNA, 19 bp, Artificial sequence
  Primer
ctggactcatgagtccagc

SEQ ID NO: 15036 - DNA, 19 bp, Artificial sequence
  Primer
ctggactcatgagtccagg

SEQ ID NO: 15037 - DNA, 19 bp, Artificial sequence
  Primer
tgggactcatgagtcccaa

SEQ ID NO: 15038 - DNA, 19 bp, Artificial sequence
  Primer
tgggactcatgagtcccat

SEQ ID NO: 15039 - DNA, 19 bp, Artificial sequence
  Primer
tgggactcatgagtcccac

SEQ ID NO: 15040 - DNA, 19 bp, Artificial sequence
  Primer
tgggactcatgagtcccag

SEQ ID NO: 15041 - DNA, 19 bp, Artificial sequence
  Primer
agggactcatgagtcccta

SEQ ID NO: 15042 - DNA, 19 bp, Artificial sequence
  Primer
agggactcatgagtccctt

SEQ ID NO: 15043 - DNA, 19 bp, Artificial sequence
  Primer
agggactccggagtccctc

SEQ ID NO: 15044 - DNA, 19 bp, Artificial sequence
  Primer
agggactcatgagtccctg

SEQ ID NO: 15045 - DNA, 19 bp, Artificial sequence
  Primer
ggggactcatgagtcccca

SEQ ID NO: 15046 - DNA, 19 bp, Artificial sequence
  Primer
ggggactcatgagtcccct

SEQ ID NO: 15047 - DNA, 19 bp, Artificial sequence
  Primer
ggggactcatgagtccccg

SEQ ID NO: 15048 - DNA, 19 bp, Artificial sequence
  Primer
cgggactcatgagtcccga

SEQ ID NO: 15049 - DNA, 19 bp, Artificial sequence
  Primer
cgggactcatgagtcccgt

SEQ ID NO: 15050 - DNA, 19 bp, Artificial sequence
  Primer
cgggactcatgagtcccgc

SEQ ID NO: 15051 - DNA, 19 bp, Artificial sequence
  Primer
gcagactctagagtctgct

SEQ ID NO: 15052 - DNA, 19 bp, Artificial sequence
  Primer
gcagactctagagtctgcc

SEQ ID NO: 15053 - DNA, 19 bp, Artificial sequence
  Primer
gcagactctagagtctgcg

SEQ ID NO: 15054 - DNA, 19 bp, Artificial sequence
  Primer
ccagactctagagtctgga

SEQ ID NO: 15055 - DNA, 19 bp, Artificial sequence
  Primer
ccagactctagagtctggt

SEQ ID NO: 15056 - DNA, 19 bp, Artificial sequence
  Primer
ccagactctagagtctggc

SEQ ID NO: 15057 - DNA, 19 bp, Artificial sequence
  Primer
ccagactctagagtctggg

SEQ ID NO: 15058 - DNA, 19 bp, Artificial sequence
  Primer
gctgactctagagtcagca

SEQ ID NO: 15059 - DNA, 19 bp, Artificial sequence
  Primer
gctgactctagagtcagcc

SEQ ID NO: 15060 - DNA, 19 bp, Artificial sequence
  Primer
gctgactctagagtcagcg

SEQ ID NO: 15061 - DNA, 19 bp, Artificial sequence
  Primer
cctgactctagagtcagga

SEQ ID NO: 15062 - DNA, 19 bp, Artificial sequence
  Primer
cctgactctagagtcaggt

SEQ ID NO: 15063 - DNA, 19 bp, Artificial sequence
  Primer
cctgactctagagtcaggc

SEQ ID NO: 15064 - DNA, 19 bp, Artificial sequence
  Primer
cctgactctagagtcaggg

SEQ ID NO: 15065 - DNA, 19 bp, Artificial sequence
  Primer
gacgactctagagtcgtca

SEQ ID NO: 15066 - DNA, 19 bp, Artificial sequence
  Primer
gacgactctagagtcgtct

SEQ ID NO: 15067 - DNA, 19 bp, Artificial sequence
  Primer
gacgactctagagtcgtcc

SEQ ID NO: 15068 - DNA, 19 bp, Artificial sequence
  Primer
gacgactctagagtcgtcg

SEQ ID NO: 15069 - DNA, 19 bp, Artificial sequence
  Primer
cacgactctagagtcgtga

SEQ ID NO: 15070 - DNA, 19 bp, Artificial sequence
  Primer
cacgactctagagtcgtgt

SEQ ID NO: 15071 - DNA, 19 bp, Artificial sequence
  Primer
cacgactctagagtcgtgc

SEQ ID NO: 15072 - DNA, 19 bp, Artificial sequence
  Primer
cacgactctagagtcgtgg

SEQ ID NO: 15073 - DNA, 19 bp, Artificial sequence
  Primer
tccgactctagagtcggaa

SEQ ID NO: 15074 - DNA, 19 bp, Artificial sequence
  Primer
tccgactctagagtcggat

SEQ ID NO: 15075 - DNA, 19 bp, Artificial sequence
  Primer
tccgactctagagtcggac

SEQ ID NO: 15076 - DNA, 19 bp, Artificial sequence
  Primer
tccgactctagagtcggag

SEQ ID NO: 15077 - DNA, 19 bp, Artificial sequence
  Primer
accgactctagagtcggta

SEQ ID NO: 15078 - DNA, 19 bp, Artificial sequence
  Primer
accgactctagagtcggtt

SEQ ID NO: 15079 - DNA, 19 bp, Artificial sequence
  Primer
accgactctagagtcggtc

SEQ ID NO: 15080 - DNA, 19 bp, Artificial sequence
  Primer
accgactctagagtcggtg

SEQ ID NO: 15081 - DNA, 19 bp, Artificial sequence
  Primer
gccgactctagagtcggca

SEQ ID NO: 15082 - DNA, 19 bp, Artificial sequence
  Primer
gccgactctagagtcggct

SEQ ID NO: 15083 - DNA, 19 bp, Artificial sequence
  Primer
gccgactctagagtcggcg

SEQ ID NO: 15084 - DNA, 19 bp, Artificial sequence
  Primer
cccgactctagagtcggga

SEQ ID NO: 15085 - DNA, 19 bp, Artificial sequence
  Primer
cccgactctagagtcgggt

SEQ ID NO: 15086 - DNA, 19 bp, Artificial sequence
  Primer
cccgactctagagtcgggc

SEQ ID NO: 15087 - DNA, 19 bp, Artificial sequence
  Primer
ggagactctagagtctcca

SEQ ID NO: 15088 - DNA, 19 bp, Artificial sequence
  Primer
ggagactctagagtctcct

SEQ ID NO: 15089 - DNA, 19 bp, Artificial sequence
  Primer
ggagactctagagtctccc

SEQ ID NO: 15090 - DNA, 19 bp, Artificial sequence
  Primer
ggagactctagagtctccg

SEQ ID NO: 15091 - DNA, 19 bp, Artificial sequence
  Primer
cgagactctagagtctcgt

SEQ ID NO: 15092 - DNA, 19 bp, Artificial sequence
  Primer
cgagactctagagtctcgc

SEQ ID NO: 15093 - DNA, 19 bp, Artificial sequence
  Primer
cgagactctagagtctcgg

SEQ ID NO: 15094 - DNA, 19 bp, Artificial sequence
  Primer
ggtgactctagagtcacca

SEQ ID NO: 15095 - DNA, 19 bp, Artificial sequence
  Primer
ggtgactctagagtcacct

SEQ ID NO: 15096 - DNA, 19 bp, Artificial sequence
  Primer
ggtgactctagagtcaccc

SEQ ID NO: 15097 - DNA, 19 bp, Artificial sequence
  Primer
ggtgactctagagtcaccg

SEQ ID NO: 15098 - DNA, 19 bp, Artificial sequence
  Primer
cgtgactctagagtcacga

SEQ ID NO: 15099 - DNA, 19 bp, Artificial sequence
  Primer
cgtgactctagagtcacgc

SEQ ID NO: 15100 - DNA, 19 bp, Artificial sequence
  Primer
cgtgactctagagtcacgg

SEQ ID NO: 15101 - DNA, 19 bp, Artificial sequence
  Primer
gaggactctagagtcctca

SEQ ID NO: 15102 - DNA, 19 bp, Artificial sequence
  Primer
gaggactctagagtcctct

SEQ ID NO: 15103 - DNA, 19 bp, Artificial sequence
  Primer
gaggactctagagtcctcc

SEQ ID NO: 15104 - DNA, 19 bp, Artificial sequence
  Primer
gaggactctagagtcctcg

SEQ ID NO: 15105 - DNA, 19 bp, Artificial sequence
  Primer
caggactctagagtcctga

SEQ ID NO: 15106 - DNA, 19 bp, Artificial sequence
  Primer
caggactctagagtcctgt

SEQ ID NO: 15107 - DNA, 19 bp, Artificial sequence
  Primer
caggactctagagtcctgc

SEQ ID NO: 15108 - DNA, 19 bp, Artificial sequence
  Primer
caggactctagagtcctgg

SEQ ID NO: 15109 - DNA, 19 bp, Artificial sequence
  Primer
gtggactctagagtccaca

SEQ ID NO: 15110 - DNA, 19 bp, Artificial sequence
  Primer
gtggactctagagtccact

SEQ ID NO: 15111 - DNA, 19 bp, Artificial sequence
  Primer
gtggactctagagtccacc

SEQ ID NO: 15112 - DNA, 19 bp, Artificial sequence
  Primer
gtggactctagagtccacg

SEQ ID NO: 15113 - DNA, 19 bp, Artificial sequence
  Primer
ctggactctagagtccaga

SEQ ID NO: 15114 - DNA, 19 bp, Artificial sequence
  Primer
ctggactctagagtccagt

SEQ ID NO: 15115 - DNA, 19 bp, Artificial sequence
  Primer
ctggactctagagtccagc

SEQ ID NO: 15116 - DNA, 19 bp, Artificial sequence
  Primer
ctggactctagagtccagg

SEQ ID NO: 15117 - DNA, 19 bp, Artificial sequence
  Primer
tgggactctagagtcccaa

SEQ ID NO: 15118 - DNA, 19 bp, Artificial sequence
  Primer
tgggactctagagtcccat

SEQ ID NO: 15119 - DNA, 19 bp, Artificial sequence
  Primer
tgggactctagagtcccac

SEQ ID NO: 15120 - DNA, 19 bp, Artificial sequence
  Primer
tgggactctagagtcccag

SEQ ID NO: 15121 - DNA, 19 bp, Artificial sequence
  Primer
agggactctagagtcccta

SEQ ID NO: 15122 - DNA, 19 bp, Artificial sequence
  Primer
agggactctagagtccctt

SEQ ID NO: 15123 - DNA, 19 bp, Artificial sequence
  Primer
agggactctagagtccctc

SEQ ID NO: 15124 - DNA, 19 bp, Artificial sequence
  Primer
agggactctagagtccctg

SEQ ID NO: 15125 - DNA, 19 bp, Artificial sequence
  Primer
ggggactctagagtcccca

SEQ ID NO: 15126 - DNA, 19 bp, Artificial sequence
  Primer
ggggactctagagtcccct

SEQ ID NO: 15127 - DNA, 19 bp, Artificial sequence
  Primer
ggggactctagagtccccg

SEQ ID NO: 15128 - DNA, 19 bp, Artificial sequence
  Primer
cgggactctagagtcccga

SEQ ID NO: 15129 - DNA, 19 bp, Artificial sequence
  Primer
cgggactctagagtcccgt

SEQ ID NO: 15130 - DNA, 19 bp, Artificial sequence
  Primer
cgggactctagagtcccgc

SEQ ID NO: 15131 - DNA, 17 bp, Artificial sequence
  Primer
cagactcgcgagtctga

SEQ ID NO: 15132 - DNA, 17 bp, Artificial sequence
  Primer
cagactcgcgagtctgt

SEQ ID NO: 15133 - DNA, 17 bp, Artificial sequence
  Primer
cagactcgcgagtctgc

SEQ ID NO: 15134 - DNA, 17 bp, Artificial sequence
  Primer
cagactcgcgagtctgg

SEQ ID NO: 15135 - DNA, 17 bp, Artificial sequence
  Primer
ctgactcgcgagtcaga

SEQ ID NO: 15136 - DNA, 17 bp, Artificial sequence
  Primer
ctgactcgcgagtcagt

SEQ ID NO: 15137 - DNA, 17 bp, Artificial sequence
  Primer
ctgactcgcgagtcagc

SEQ ID NO: 15138 - DNA, 17 bp, Artificial sequence
  Primer
ctgactcgcgagtcagg

SEQ ID NO: 15139 - DNA, 17 bp, Artificial sequence
  Primer
acgactcgcgagtcgta

SEQ ID NO: 15140 - DNA, 17 bp, Artificial sequence
  Primer
acgactcgcgagtcgtt

SEQ ID NO: 15141 - DNA, 17 bp, Artificial sequence
  Primer
acgactcgcgagtcgtc

SEQ ID NO: 15142 - DNA, 17 bp, Artificial sequence
  Primer
acgactcgcgagtcgtg

SEQ ID NO: 15143 - DNA, 17 bp, Artificial sequence
  Primer
ccgactcgcgagtcgga

SEQ ID NO: 15144 - DNA, 17 bp, Artificial sequence
  Primer
ccgactcgcgagtcggt

SEQ ID NO: 15145 - DNA, 17 bp, Artificial sequence
  Primer
ccgactcgcgagtcggc

SEQ ID NO: 15146 - DNA, 17 bp, Artificial sequence
  Primer
ccgactcgcgagtcggg

SEQ ID NO: 15147 - DNA, 17 bp, Artificial sequence
  Primer
gagactcgcgagtctca

SEQ ID NO: 15148 - DNA, 17 bp, Artificial sequence
  Primer
gagactcgcgagtctct

SEQ ID NO: 15149 - DNA, 17 bp, Artificial sequence
  Primer
gagactcgcgagtctcc

SEQ ID NO: 15150 - DNA, 17 bp, Artificial sequence
  Primer
gagactcgcgagtctcg

SEQ ID NO: 15151 - DNA, 17 bp, Artificial sequence
  Primer
gtgactcgcgagtcaca

SEQ ID NO: 15152 - DNA, 17 bp, Artificial sequence
  Primer
gtgactcgcgagtcact

SEQ ID NO: 15153 - DNA, 17 bp, Artificial sequence
  Primer
gtgactcgcgagtcacc

SEQ ID NO: 15154 - DNA, 17 bp, Artificial sequence
  Primer
gtgactcgcgagtcacg

SEQ ID NO: 15155 - DNA, 17 bp, Artificial sequence
  Primer
aggactcgcgagtccta

SEQ ID NO: 15156 - DNA, 17 bp, Artificial sequence
  Primer
aggactcgcgagtcctt

SEQ ID NO: 15157 - DNA, 17 bp, Artificial sequence
  Primer
aggactcgcgagtcctc

SEQ ID NO: 15158 - DNA, 17 bp, Artificial sequence
  Primer
aggactcgcgagtcctg

SEQ ID NO: 15159 - DNA, 17 bp, Artificial sequence
  Primer
tggactcgcgagtccaa

SEQ ID NO: 15160 - DNA, 17 bp, Artificial sequence
  Primer
tggactcgcgagtccat

SEQ ID NO: 15161 - DNA, 17 bp, Artificial sequence
  Primer
tggactcgcgagtccac

SEQ ID NO: 15162 - DNA, 17 bp, Artificial sequence
  Primer
tggactcgcgagtccag

SEQ ID NO: 15163 - DNA, 17 bp, Artificial sequence
  Primer
gggactcgcgagtccca

SEQ ID NO: 15164 - DNA, 17 bp, Artificial sequence
  Primer
gggactcgcgagtccct

SEQ ID NO: 15165 - DNA, 17 bp, Artificial sequence
  Primer
gggactcgcgagtcccc

SEQ ID NO: 15166 - DNA, 17 bp, Artificial sequence
  Primer
gggactcgcgagtcccg

SEQ ID NO: 15167 - DNA, 17 bp, Artificial sequence
  Primer
gcgactcgcgagtcgca

SEQ ID NO: 15168 - DNA, 17 bp, Artificial sequence
  Primer
gcgactcgcgagtcgct

SEQ ID NO: 15169 - DNA, 17 bp, Artificial sequence
  Primer
gcgactcgcgagtcgcc

SEQ ID NO: 15170 - DNA, 17 bp, Artificial sequence
  Primer
cggactcgcgagtccga

SEQ ID NO: 15171 - DNA, 17 bp, Artificial sequence
  Primer
cggactcgcgagtccgt

SEQ ID NO: 15172 - DNA, 17 bp, Artificial sequence
  Primer
cggactcgcgagtccgc

SEQ ID NO: 15173 - DNA, 17 bp, Artificial sequence
  Primer
acgactccggagtcgta

SEQ ID NO: 15174 - DNA, 17 bp, Artificial sequence
  Primer
acgactccggagtcgtt

SEQ ID NO: 15175 - DNA, 17 bp, Artificial sequence
  Primer
acgactccggagtcgtc

SEQ ID NO: 15176 - DNA, 17 bp, Artificial sequence
  Primer
acgactccggagtcgtg

SEQ ID NO: 15177 - DNA, 17 bp, Artificial sequence
  Primer
ccgactccggagtcgga

SEQ ID NO: 15178 - DNA, 17 bp, Artificial sequence
  Primer
ccgactccggagtcggt

SEQ ID NO: 15179 - DNA, 17 bp, Artificial sequence
  Primer
ccgactccggagtcggc

SEQ ID NO: 15180 - DNA, 17 bp, Artificial sequence
  Primer
ccgactccggagtcggg

SEQ ID NO: 15181 - DNA, 17 bp, Artificial sequence
  Primer
gtgactccggagtcaca

SEQ ID NO: 15182 - DNA, 17 bp, Artificial sequence
  Primer
gtgactccggagtcact

SEQ ID NO: 15183 - DNA, 17 bp, Artificial sequence
  Primer
gtgactccggagtcacc

SEQ ID NO: 15184 - DNA, 17 bp, Artificial sequence
  Primer
gtgactccggagtcacg

SEQ ID NO: 15185 - DNA, 17 bp, Artificial sequence
  Primer
aggactccggagtccta

SEQ ID NO: 15186 - DNA, 17 bp, Artificial sequence
  Primer
aggactccggagtcctt

SEQ ID NO: 15187 - DNA, 17 bp, Artificial sequence
  Primer
aggactccggagtcctc

SEQ ID NO: 15188 - DNA, 17 bp, Artificial sequence
  Primer
aggactccggagtcctg

SEQ ID NO: 15189 - DNA, 17 bp, Artificial sequence
  Primer
tggactccggagtccaa

SEQ ID NO: 15190 - DNA, 17 bp, Artificial sequence
  Primer
tggactccggagtccat

SEQ ID NO: 15191 - DNA, 17 bp, Artificial sequence
  Primer
tggactccggagtccac

SEQ ID NO: 15192 - DNA, 17 bp, Artificial sequence
  Primer
tggactccggagtccag

SEQ ID NO: 15193 - DNA, 17 bp, Artificial sequence
  Primer
gggactccggagtccca

SEQ ID NO: 15194 - DNA, 17 bp, Artificial sequence
  Primer
gggactccggagtccct

SEQ ID NO: 15195 - DNA, 17 bp, Artificial sequence
  Primer
gggactccggagtcccc

SEQ ID NO: 15196 - DNA, 17 bp, Artificial sequence
  Primer
gggactccggagtcccg

SEQ ID NO: 15197 - DNA, 17 bp, Artificial sequence
  Primer
gcgactccggagtcgca

SEQ ID NO: 15198 - DNA, 17 bp, Artificial sequence
  Primer
gcgactccggagtcgct

SEQ ID NO: 15199 - DNA, 17 bp, Artificial sequence
  Primer
gcgactccggagtcgcc

SEQ ID NO: 15200 - DNA, 17 bp, Artificial sequence
  Primer
cggactccggagtccga

SEQ ID NO: 15201 - DNA, 17 bp, Artificial sequence
  Primer
cggactccggagtccgt

SEQ ID NO: 15202 - DNA, 17 bp, Artificial sequence
  Primer
cggactccggagtccgc

SEQ ID NO: 15203 - DNA, 17 bp, Artificial sequence
  Primer
ccgactcatgagtcgga

SEQ ID NO: 15204 - DNA, 17 bp, Artificial sequence
  Primer
ccgactcatgagtcggt

SEQ ID NO: 15205 - DNA, 17 bp, Artificial sequence
  Primer
ccgactcatgagtcggc

SEQ ID NO: 15206 - DNA, 17 bp, Artificial sequence
  Primer
ccgactcatgagtcggg

SEQ ID NO: 15207 - DNA, 17 bp, Artificial sequence
  Primer
gcgactcatgagtcgca

SEQ ID NO: 15208 - DNA, 17 bp, Artificial sequence
  Primer
gcgactcatgagtcgct

SEQ ID NO: 15209 - DNA, 17 bp, Artificial sequence
  Primer
gcgactcatgagtcgcc

SEQ ID NO: 15210 - DNA, 17 bp, Artificial sequence
  Primer
cggactcatgagtccga

SEQ ID NO: 15211 - DNA, 17 bp, Artificial sequence
  Primer
cggactcatgagtccgt

SEQ ID NO: 15212 - DNA, 17 bp, Artificial sequence
  Primer
cggactcatgagtccgc

SEQ ID NO: 15213 - DNA, 17 bp, Artificial sequence
  Primer
gcgactctagagtcgca

SEQ ID NO: 15214 - DNA, 17 bp, Artificial sequence
  Primer
gcgactctagagtcgct

SEQ ID NO: 15215 - DNA, 17 bp, Artificial sequence
  Primer
gcgactctagagtcgcc

SEQ ID NO: 15216 - DNA, 16 bp, Artificial sequence
  Primer
gcgactcgcgagtcgc

SEQ ID NO: 15217 - DNA, 16 bp, Artificial sequence
  Primer
acgactcgcgagtcgt

SEQ ID NO: 15218 - DNA, 16 bp, Artificial sequence
  Primer
ccgactcgcgagtcgg

SEQ ID NO: 15219 - DNA, 16 bp, Artificial sequence
  Primer
cggactcgcgagtccg

SEQ ID NO: 15220 - DNA, 16 bp, Artificial sequence
  Primer
aggactcgcgagtcct

SEQ ID NO: 15221 - DNA, 16 bp, Artificial sequence
  Primer
tggactcgcgagtcca

SEQ ID NO: 15222 - DNA, 16 bp, Artificial sequence
  Primer
gggactcgcgagtccc

SEQ ID NO: 15223 - DNA, 16 bp, Artificial sequence
  Primer
cagactcgcgagtctg

SEQ ID NO: 15224 - DNA, 16 bp, Artificial sequence
  Primer
gagactcgcgagtctc

SEQ ID NO: 15225 - DNA, 16 bp, Artificial sequence
  Primer
ctgactcgcgagtcag

SEQ ID NO: 15226 - DNA, 16 bp, Artificial sequence
  Primer
gtgactcgcgagtcac

SEQ ID NO: 15227 - DNA, 16 bp, Artificial sequence
  Primer
gcgactccggagtcgc

SEQ ID NO: 15228 - DNA, 16 bp, Artificial sequence
  Primer
acgactccggagtcgt

SEQ ID NO: 15229 - DNA, 16 bp, Artificial sequence
  Primer
ccgactccggagtcgg

SEQ ID NO: 15230 - DNA, 16 bp, Artificial sequence
  Primer
cggactccggagtccg

SEQ ID NO: 15231 - DNA, 16 bp, Artificial sequence
  Primer
aggactccggagtcct

SEQ ID NO: 15232 - DNA, 16 bp, Artificial sequence
  Primer
tggactccggagtcca

SEQ ID NO: 15233 - DNA, 16 bp, Artificial sequence
  Primer
gggactccggagtccc

SEQ ID NO: 15234 - DNA, 16 bp, Artificial sequence
  Primer
gtgactccggagtcac

SEQ ID NO: 15235 - DNA, 16 bp, Artificial sequence
  Primer
gcgactcatgagtcgc

SEQ ID NO: 15236 - DNA, 16 bp, Artificial sequence
  Primer
ccgactcatgagtcgg

SEQ ID NO: 15237 - DNA, 16 bp, Artificial sequence
  Primer
cggactcatgagtccg

SEQ ID NO: 15238 - DNA, 16 bp, Artificial sequence
  Primer
gcgactctagagtcgc

SEQ ID NO: 15239 - DNA, 33 bp, Artificial sequence
  Primer
gactcgtgcacgagtcatactcatctgttuacc

SEQ ID NO: 15240 - DNA, 30 bp, Artificial sequence
  Primer
gactcgtgcacgagtcttttctctggaugg
